(19) United States
(12) Patent Application Publication
(10) Pub. No.: US 2003/0113798 A1
(43) Pub. Date: Jun. 19, 2003

(54) Antigenic peptides, such as for G protein-coupled receptors (GPCRS), antibodies thereto, and systems for identifying such antigenic peptides

(76) Inventors: Glenna C. Burmer, Seattle, WA (US); Christine L. Roush, Seattle, WA (US); Joseph P. Brown, Seattle, WA (US)

Correspondence Address: Joshua King, GRAYBEAL JACKSON HALEY LLP, Suite 350, 155-108th Avenue N.E., Bellevue, WA, 98004-5973, US

(21) Appl. No.: 10/225,567

(22) Filed: Aug. 19, 2002

(30) Foreign Application Priority Data
Dec. 19, 2001 (WO) PCT/US01/50107

(51) Int. Cl. G01N 33/53; C07K 14/705; C07K 16/28; G01N 33/537; G01N 33/543

(52) U.S. Cl. 435/7.1; 530/388.22; 530/350; 435/7.92; 435/7.93

(57) ABSTRACT

The present invention provides antigenic peptides for GPCRs and antibodies relating thereto, and related systems, methods, compositions, and the like, such as diagnostics and medicaments. Where antibodies against a given GPCR are not known, the present invention provides such antibodies, and preferred antigenic sequences for producing such antibodies. Where antibodies against a given GPCR are known, the present invention provides preferred antigenic peptides for producing antibodies that exhibit improved specificity, affinity or capacity to perform antibody-related actions relative to the known antibodies.

### CROSS-REFERENCE TO RELATED APPLICATIONS

[0001] The present application claims priority from U.S. provisional patent application No. 60/257,144, filed Dec. 19, 2000 and presently pending.

### TABLE OF CONTENTS

[0002] The following is a Table of Contents to assist review of the present application:

[0003] CROSS-REFERENCE TO RELATED APPLICATIONS

[0004] TABLE OF CONTENTS

[0005] BACKGROUND

[0006] SUMMARY

[0007] BRIEF DESCRIPTION OF THE DRAWING

[0008] DETAILED DESCRIPTION

[0009] A. INTRODUCTION AND OVERVIEW

[0010] B. DEFINITIONS

[0011] C. SELECTION OF DESIRED ANTIGENIC PEPTIDES FOR GPCRs AND OTHER POLYPEPTIDES

[0012] D. GENERAL DISCUSSION OF ANTIGENIC PEPTIDES RELATED TO PARTICULAR GPCRS

[0013] ANTIGENIC PEPTIDES GENERALLY:

[0014] EXPRESSION PROFILES BASED ON PROTEINS:

[0015] SCREENING FOR ACTIVITY:

[0016] PROTEIN PURIFICATION:

[0017] E. CERTAIN ASSAYS, ANTIBODIES, PROBES, THERAPEUTICS, AND OTHER SYSTEMS AND ASPECTS, OF THE INVENTION

[0018] 1. SYSTEMS AND METHODS FOR SCREENING FOR A PARTICULAR GPCR OR ANTIGENIC PEPTIDE

[0019] SCREENING FOR ANTIGENIC PEPTIDES:

[0020] SCREENING FOR/WITH ANTIGENIC PEPTIDES:

[0021] LIST OF ASSAYS:

[0022] ENZYME-LINKED IMMUNOSORBENT ASSAYS (ELISA):

[0023] IMMUNOFLUORESCENCE ASSAY:

[0024] BEAD AGGLUTINATION ASSAYS:

[0025] ENZYME IMMUNOASSAYS:

[0026] SANDWICH ASSAY:

[0027] SEQUENTIAL AND SIMULTANEOUS ASSAYS:

[0028] IMMUNOSTICK (DIP-STICK) ASSAYS:

[0029] IMMUNOCHROMATOGRAPHIC ASSAYS:

[0030] IMMUNOFILTRATION ASSAYS:

[0031] BIOSENSOR ASSAYS:

[0032] 2. ANTIBODIES

[0033] ANTIBODIES GENERATED AGAINST A PARTICULAR ANTIGENIC PEPTIDE AND ITS CORRESPONDING GPCR:

[0034] ANTIBODIES GENERALLY:

[0035] ANTI-IDIOTYPIC ANTIBODIES:

[0036] a. Antibody Preparation

[0037] (i) Polyclonal Antibodies

[0038] ANTIBODY PREP—POLYCLONAL:

[0039] ANTIBODY PREP—ADJUVANTS (ALL ABS):

[0040] (ii) Monoclonal Antibodies

[0041] ANTIBODY PREP—MONOCLONAL:

[0042] MOABS—COMBINATORIAL:

[0043] HUMANIZED MOAB:

[0044] ANTIBODY SUBSTITUTIONS—NON-IMMUNOGLOBULIN POLYPEPTIDES (ALL ABS):

[0045] CHIMERICS:

[0046] ANTIBODY LABELING (ALL ABS):

[0047] (iii) Humanized And Human Antibodies

[0048] HUMANIZED AB GENERALLY:

[0049] (iv) Antibody Fragments

[0050] ANTIBODY FRAGMENTS:

[0051] (v) Bispecific Antibodies

[0052] BISPECIFIC ANTIBODIES GENERALLY:

[0053] ANTIBODIES—HYBRID IMMUNOGLOBULIN HEAVY CHAIN:

[0054] ANTIBODIES—CROSS-LINKED OR “HETEROCONJUGATE”:

[0055] ANTIBODIES—DIABODIES:

[0056] ANTIBODIES—OTHER:

[0057] b. Antibody Purification

[0058] ANTIBODY PURIFICATION GENERALLY:

[0059] BEFORE LPHIC:

[0060] LPHIC:

[0061] POST LPHIC:

[0062] c. Some Uses For Antibodies Described Herein

[0063] (i) Generally

[0064] GENERALLY:

[0065] ASSAYS:

[0066] DIAGNOSTIC USES:

[0067] (ii) Assays

[0068] ASSAYS:

[0069] COMPETITIVE BINDING ASSAYS:

[0070] (iii) Affinity Purification

[0071] AFFINITY PURIFICATION:

[0072] (iv) Therapeutics

[0073] THERAPEUTIC USES:

[0074] THERAPEUTIC FORMULATIONS:

[0075] THERAPEUTIC FORMULATIONS—STERILE:

[0076] THERAPEUTIC ADMINISTRATIONS:

[0077] THERAPEUTIC ADMINISTRATIONS—SUSTAINED RELEASE-POLYMERS:

[0078] THERAPEUTIC ADMINISTRATIONS—SUSTAINED RELEASE-LIPOSOMES:

[0079] THERAPEUTICALLY EFFECTIVE AMOUNT:

[0080] 5. DRUG DESIGN BASED ON THE ANTIGENS HEREIN OR ANTIBODIES THERETO

[0081] DISEASE/CONDITIONS LIST:

[0082] EXAMPLES

[0083] SEQUENCE LISTING:

[0084] CLAIMS

[0085] ABSTRACT

### BACKGROUND

[0086] G protein-coupled receptors (GPCRs) are a large group of proteins that transmit signals across cell membranes. In general terms, GPCRs function somewhat like doorbells. When a molecule outside the cell contacts the GPCR (pushes the doorbell), the GPCR changes its shape and activates “G proteins” inside the cell (similar to the doorbell causing the bell to ring inside the house, which in turn causes people inside to answer the door). GPCRs are like high-security doorbells because each GPCR responds to only one specific kind of signaling molecule (called its “endogenous ligand”), kind of like a high-tech door lock that responds to only one fingerprint. Part of the GPCR is located outside the cell (the “extracellular domain”), part spans the cell's membrane (the “transmembrane domain”), and part is located inside the cell (the “intracellular domain”). Thus, GPCRs are embedded in the outer membrane of a cell and recognize and bind certain signaling molecules that are present in the spaces surrounding the cell. GPCRs are used by cells to keep an eye on the cells' own activity and on the environment. In organisms that have many cells, the cells use GPCRs to talk to each other.

[0087] GPCRs are important to the pharmaceutical industry and other industries. For example, many drugs, including some antibody-based drugs, act by binding to specific GPCRs and initiating or inhibiting their intracellular actions, and diagnostics and therapeutics based on GPCRs or on antibodies for GPCRs are becoming increasingly important.

[0088] General concepts about GPCRs are discussed in more scientific terms in the following paragraphs.

[0089] The GPCR superfamily has at least 250 members, Strader et al., FASEB J., 9:745-754 (1995); Strader et al., Annu. Rev. Biochem., 63:101-32 (1994). GPCRs play important roles in diverse cellular processes including cell proliferation and differentiation, leukocyte migration in response to inflammation, gene transcription, vision (the rhodopsins), smell (the olfactory receptors), neurotransmission (muscarinic acetylcholine, dopamine, and adrenergic receptors), and hormonal response (luteinizing hormone and thyroid-stimulating hormone receptors). Strader et al., supra; U.S. Pat. Nos. 5,994,097 and 6,063,596. Many important drugs produce their therapeutic actions through their interaction with GPCRs.

[0090] Nucleotide and amino acid sequences for many GPCRs have been reported and can be found in public databases such as GenBank and GenPept. Generally speaking, different GPCRs show both structural and sequence similarities. The most conserved domains of GPCRs are the transmembrane domains and the first two cytoplasmic loops. GPCRs range in size from under 400 to over 1000 amino acids. Coughlin, S. R., Curr. Opin. Cell Biol. 6:191-197 (1994). They contain seven hydrophobic transmembrane regions that span the cellular membrane and form a bundle of antiparallel alpha helices. McKee K. K., supra. The bundle of helices forming the transmembrane regions provide many structural and functional features of the receptor. In most cases, the bundle of helices form a pocket that binds a signaling molecule. However, when the binding site accommodates larger molecules, the extracellular N-terminal segment or one or more of the three extracellular loops participate in binding and in subsequent induction of conformational change in the intracellular portions of the receptor. These helices are joined at their ends by three intracellular and three extracellular loops. GPCRs also contain cysteine disulfide bridges between the second and third extracellular loops, an extracellular N-terminus, and a cytoplasmic or intracellular C-terminus. The N-terminus is often glycosylated, while the C-terminus is generally phosphorylated. A conserved, acidic-Arg-aromatic triplet present in the second cytoplasmic loop may interact with G Proteins. Most GPCRs contain a characteristic consensus pattern. Watson, S. and S. Arkinstall, The G protein Linked Receptor Facts Book, Academic Press, San Diego, Calif. (1994); Bolander, F. F. Molecular Endocrinology, Academic Press, San Diego, Calif. (1994).

[0091] Although GPCRs have many features in common, each GPCR has its own unique characteristics as well. GPCRs have varying nucleotide and amino acid sequences, and varying antigenicity. GPCRs bind a diverse array of specific, extracellular signaling molecules (which can also be referred to as “ligands”) including peptides, cytokines, hormones, neurotransmitters, growth factors, and specialized stimuli such as photons, flavorants, and odorants. Identified ligands include, for example, purines, nucleotides (e.g., adenosine, cAMP, NTPs), biogenic amines (e.g., epinephrine, norepinepherine, dopamine, histamine, noradrenaline, serotonin), acetylcholine, peptides (e.g., angiotensin, calcitonin, chemokines, corticotropin releasing factor, galanin, growth hormone releasing hormone, gastric inhibitory peptide, glucagon, neuropeptide Y, neurotensin, opioids, thrombin, secretin, somatostatin, thyrotropin releasing hormone, vasopressin, vasoactive intestinal peptide), lipids and lipid-based compounds (e.g., cannabinoids, platelet activating factor), excitatory and inhibitory amino acids (e.g., glutamate, GABA), ions (e.g., calcium), and toxins.

[0092] In general, a GPCR binds only one type of signaling molecule and GPCRs are classified according to subfamilies based upon their selectivity and specificity for a particular ligand. When the ligand for a receptor is not known, the receptor is known as an orphan receptor. The extracellular domain interacts with or binds to certain signaling molecules or ligands located outside of the cell. The binding of a ligand to the extracellular domain alters the conformation of the receptor's intracellular domain causing the activation of a G protein. The G protein then activates or inactivates a separate plasma-membrane-bound enzyme or ion channel. This chain of events alters the concentration of one or more intracellular messengers (second messengers) such as cyclic AMP (cAMP), inositol triphosphate, diacylglycerol, or Ca²⁺. These, in turn, alter the activity of other intracellular proteins such as cAMP-dependent protein kinase and Ca²⁺/calmodulin-dependent protein kinases, leading to the transduction and amplification of the original extracellular signal. Baldwin, J. M., Curr. Opin. Cell Biol. 6:180-190 (1994). The G protein is deactivated by hydrolysis of GTP by GTPase. U.S. Pat. Nos. 5,994,097 and 6,063,596.

[0093] GPCR mutations, both of the loss-of-function and of the activating variety, have been associated with numerous human diseases, Coughlin, supra. For example, retinitis pigmentosa may arise from either loss-of-function or activating mutations in the rhodopsin gene. Somatic activating mutations in the thyrotropin receptor cause hyperfunctioning thyroid adenomas, Parma, J. et al., Nature 365:649-651 (1993). Parma et al. indicate that it may be possible that certain G protein-coupled receptors susceptible to constitutive activation may behave as protooncogenes. Interestingly, GPCRs have functional homologues in human cytomegalovirus and herpesvirus, so GPCRs may have been acquired during evolution for viral pathogenesis, Strader et al., FASEB J., 9:745-754 (1995); Arvanitakis et al., Nature, 385:347-350 (1997); Murphy, Annu. Rev. Immunol. 12:593-633 (1994). The importance of the GPCR superfamily is further highlighted by the recent discoveries that some of its family members, the chemokine receptors CXCR4/Fusin and CCR5, are co-receptors for T cell-tropic and macrophage-tropic HIV virus strains, respectively, Alkhatib et al., Science, 272:1955 (1996); Choe et al., Cell, 85:1135 (1996); Deng et al., Nature, 381:661 (1996); Doranz et al., Cell, 85:1149 (1996); Dragic et al., Nature, 381:667 (1996); Feng et al., Science, 272:872 (1996). It is conceivable that blocking these receptors may prevent infection by the human immunodeficiency (HIV) virus. Other GPCR-related items include regulating cellular metabolism and diagnosing, treating and preventing particular diseases associated with particular GPCRs.

[0094] One important way to evaluate GPCRs and antibodies for GPCRs as novel drug targets and for other purposes such as diagnostics is through the creation and use of databases. Such databases can provide large amounts of information about genes, proteins, and other biological matter. An excellent example of such a database is the GPCR database created and maintained by LifeSpan BioSciences, Inc., Seattle, Wash., USA, which database is available by subscription to researchers and others needing such information. The information in the databases can, for example, be searched, compared, and analyzed. The compilation of such databases, as well as the searching, comparing, etc., of the databases, can be referred to as the field of “bioinformatics.” Investigations largely related to genes, such as the information found from the sequencing of the human genome, can be called “genomics” while similar activities on proteins can be called “proteomics.”

[0095] There has gone unmet a need for improved systems, compositions, methods, and the like relating to improved antigenicity of peptides from GPCRs and antibodies relating thereto. The present invention provides these and other advantages.

### SUMMARY

[0096] The present invention provides antigenic peptides for GPCRs and antibodies relating thereto, and related systems, methods, compositions, and the like, such as diagnostics and medicaments. Where antibodies against a given GPCR are not known, the present invention provides such antibodies, and preferred antigenic sequences for producing such antibodies. Where antibodies against a given GPCR are known, the present invention provides preferred antigenic peptides for producing antibodies that exhibit improved specificity, affinity or capacity to perform antibody-related actions relative to the known antibodies. The present invention also provides improved methods of selecting antigenic peptides from any desired protein or polypeptide, as well as antigenic peptides so produced and antibodies against such antigenic peptides.

[0097] The antigenic peptides and antibodies herein can be used, for example, to detect the presence or absence of corresponding GPCRs. They can be used to diagnose a variety of diseases and disorders in which GPCRs are involved, such as, e.g., immune-related diseases, cell growth-related diseases, cell regeneration-related diseases, immunological-related cell proliferative diseases, and autoimmune diseases. Examples of specific diseases include AIDS, allergies, Alzheimer's disease, amyotrophic lateral sclerosis, atherosclerosis, bacterial, fungal, protozoan and viral infections, benign prostatic hypertrophy, bone diseases (e.g., osteoarthritis, osteoporosis), carcinoma (e.g., basal cell carcinoma, breast carcinoma, embryonal carcinoma, ovarian carcinoma, renal cell carcinoma, lung adenocarcinoma, lung small cell carcinoma, pancreatic carcinoma, prostate carcinoma, transitional carcinoma of the bladder, squamous cell carcinoma, thyroid carcinoma), cardiomyopathy, chronic and acute inflammation, circadian rhythm disorders, COPD, Crohn's disease, diabetes, Duchenne muscular dystrophy, embryonal carcinoma, endotoxic shock, environmental stress (e.g., by heat, UV or chemicals), gastrointestinal disorders, glioblastoma multiform, graft vs. host disease, Hodgkin's disease, inflammatory bowel disease, ischemia, stroke, lymphoma, macular degeneration, malignant cytokine production, malignant fibrous histiocytoma, melanoma, meningioma, mesothelioma, multiple sclerosis, nasal congestion, pain, Parkinson's disease, prostate carcinoma, psoriasis, rhabdomyosarcoma, psychotic or neurological disorders (e.g., anxiety, depression, schizophrenia, dementia, mental retardation, memory loss, epilepsy, locomotor problems, respiratory disorders, asthma, eating/body weight disorders including obesity, bulimia, diabetes, anorexia, nausea, hypertension, hypotension), renal disorders, reperfusion injury, rheumatoid arthritis, sarcoma (e.g., chondrosarcoma, Ewing's sarcoma, osteosarcoma), septicemia, seminoma, sexual/reproductive disorders, tonsil, transitional carcinoma of the bladder, transplant rejection, trauma, tuberculosis, ulcers, ulcerative colitis, urinary retention, vascular and cardiovascular disorders, or any other disease or disorder in which G protein-coupled receptors are involved, as well as learning and/or memory disorders, diabetes, pain perception disorders, anorexia, obesity, hormonal release problems, or any other disease or disorder in which a specific GPCR is involved.

[0098] The association of particular GPCRs with particular diseases, disorders or conditions will be apparent to a person of ordinary skill in the art in view of the present application, and thus the association with the antibodies of the present invention to the corresponding diseases, disorders or conditions.

[0099] Thus, in one aspect the present invention provides isolated antigenic peptides according to any one of SEQ ID NOS. 692-2292. The isolated antigenic peptides also comprise an amino acid sequences that are at least about 90% or 95% identical to such sequences, or be an analog of such sequences, or comprise a short antigenic amino acid sequence that is identical to at least 5 consecutive amino acids set forth in any one of such sequences or contain no more than one conservative amino acid substitution over at least 7 consecutive amino acids set forth in any of such sequences. The present invention also provides antibodies, particularly isolated antibody having high specificity and high affinity or avidity for a particular GPCR or other target polypeptide or protein, generated using the antigenic peptides discussed herein.

[0100] The present invention also provides isolated nucleic acid molecules encoding an antigenic peptide or antibody as described herein. The molecule can encode a naturally occurring human antigenic peptide. In some embodiments, the present invention provides processes for producing an isolated polynucleotide can comprise hybridizing a nucleotide encoding an antigenic peptide as discussed herein to DNA such as genomic DNA under stringent or highly stringent conditions and isolating the polynucleotide detected with the nucleotide.

[0101] The present invention also provides kits and assays, such as kits for the detection of antibodies against a particular GPCR or other target polypeptide in a sample comprising: a) an isolated antigenic peptide as discussed herein and derived from the particular GPCR, and b) at least one of a reagent or a device for detecting the antibodies, or comprising: a) an isolated antibody as described herein, and b) at least one of a reagent or a device for detecting the antibody. The assays include detection of a particular GPCR in a sample, comprising: a) providing an isolated antigenic peptide, b) contacting the isolated antigenic peptide corresponding to the particular GPCR with the sample under conditions suitable and for a time sufficient for the antigenic peptide to bind to one or more antibodies specific for the target protein present in the sample, to provide an antibody-bound target protein, and c) detecting the antibody-bound antigenic peptide, and therefrom determining whether the sample contains the particular GPCR. The assays can further comprise the step of binding the isolated antigenic peptide or the antibody to a solid substrate, and the sample can be an unpurified sample, for example from a human being.

[0102] The assay can be selected from the group consisting of a countercurrent immuno-electrophoresis (CIEP) assay, a radioimmunoassay, a radioimmunoprecipitation, an enzyme-linked immuno-sorbent assay (ELISA), a dot blot assay, an inhibition or competition assay, a sandwich assay, an immunostick (dip-stick) assays, a simultaneous assay, an immunochromatographic assay, an immunofiltration assay, a latex bead agglutination assay, an immunofluorescent assay, a biosensor assay, and a low-light detection assay.

[0103] In other aspects, the present invention provides methods of identifying an amino acid sequence for an antigenic peptide from a candidate polypeptide sequence such as a polypeptide or protein wherein the antigenic peptide has a length of about 5 to about 100 amino acids, typically 6 amino acids to about 50 amino acids, and preferably 7 amino acids to about 20 amino acids. The methods comprise: a) searching the candidate polypeptide sequence using a comparison window of the length, and b) selecting against amino acid sequences of the length and having at least 1 to 3 or 4 characteristics selected from the group consisting of 1) at least two consecutive prolines, 2) at least two consecutive serines, 3) at least two consecutive lysines, 4) at least two consecutive arginines, 5) at least two consecutive aspartic acids, 6) at least two consecutive glutamic acids, 7) methionine, 8) tryptophan, and 9) at least five consecutive amino acids comprising no charged amino acids. Preferably, the method comprises selecting against at least 5 to all of the characteristics.

[0104] The methods can comprise, independently or in addition, selecting against amino acid sequences of the desired length having at least one of the following characteristics 1) sequences having at least 5 consecutive amino acids that are identical to an alternative amino acid sequence from an alternative polypeptide that can be different from the candidate polypeptide, 2) posttranslational modification sites, and 3) highly hydrophobic sequences. The posttranslational modification sites can be phosphorylation or glycosylation sites. The methods can also comprise performing a BLAST-type or a FAST-type analyses for the candidate polypeptide sequence.

[0105] These and other aspects, features, and embodiments are set forth within this application, including the following Detailed Description and attached drawings. The present invention comprises a variety of aspects, features, and embodiments; such multiple aspects, features, and embodiments can be combined and permuted in any desired manner. In addition, various references are set forth herein, including in the Cross-Reference To Related Applications, that discuss certain compositions, apparatus, methods, or other information; all such references are incorporated herein by reference in their entirety and for all their teachings and disclosures, regardless of where the references may appear in this application.

### BRIEF DESCRIPTION OF THE DRAWING

[0106] FIG. 1 depicts representative examples of the nucleotide and amino acid sequences of the GPCRs for which antigenic peptides are set forth herein, SEQ ID NOS. 1-691.

[0107] FIG. 2 depicts amino acid sequences for the antigenic peptides for the GPCRs herein, SEQ ID NOS. 692-2292.

[0108] FIG. 3 depicts a listing of GPCRS for which commercially available antibodies are putatively available.

### DETAILED DESCRIPTION

[0109] A. Introduction and Overview

[0110] Diseases such as immune-related diseases, cell growth-related diseases, cell regeneration-related diseases, immunological-related cell proliferative diseases, and autoimmune diseases are serious health problems in the modem world. Any improvement in the diagnosis, treatment or other remediation of such diseases is a significant advance for millions of people. The present invention provides methods of identifying and selecting desirable antigenic peptides for GPCRs and other desired target or candidate proteins and polypeptides. The present invention also provides the antigenic peptides themselves, as well as antibodies against the antigenic peptides (and against proteins or polypeptides containing such antigenic peptides), and related diagnostics, antibody-based therapeutics directed to certain diseases and conditions, and other helpful compositions, systems, kits, assays and the like. The compositions, methods, and the like can be useful, for example, as agonists, antagonists, probes, and otherwise as may be desired.

[0111] The antigenic peptides have been carefully selected using specific selection criteria and methodologies set forth herein to take advantage of particularly advantageous regions of the GPCRs from which they have been derived to provide unusually specific and immunogenic antigens. These antigenic peptides are particularly useful for producing highly specific antibodies against the antigenic peptides, which, in turn, also means antibodies that are highly specific for the corresponding GPCRs containing the antigenic peptides. Accordingly, the antigenic peptides of the present invention, and the antibodies produced therefrom, are particularly useful for high specifity, low noise diagnostics and, in the case of the antibodies, for certain antibody-based therapeutics, as well as methods, kits, systems, and the like incorporating or based on such antigenic peptides or antibodies.

[0112] The antibodies produced using the antigenic peptides of the present invention, for example, have a specificity for the corresponding GPCR such that the antibodies can selectively detect the corresponding GPCR in a sample containing non-desired or contaminating proteins or polypeptides, such as a tissue or blood sample. Preferably, the antibodies have a high specificity such that no significant amounts of such proteins or polypeptides are detected, and further preferably have a specificity such that only insubstantial to essentially zero amounts of non-desirable proteins are detected.

[0113] The antibodies produced using the antigenic peptides of the present invention, for example, typically have an affinity or avidity constant (Ka) of at least about 10⁷ liters/mole, typically a high affinity or avidity at least about 10⁹ liters/mole, preferably at least about 10¹⁰ liters/mole, and further preferably at least about 10¹¹ liters/mole.

[0114] FIG. 1 sets forth the DNA and protein sequences for the GPCRs from which the antigenic peptides of the present invention were derived SEQ ID NOS. 1-691. FIG. 2 sets forth the amino acid sequences of exemplary antigenic peptides, SEQ ID NOS. 692-2292. The sequences in FIGS. 1 and 2 are listed according to SEQ ID NO and LSID, which is an identification number assigned to the given sequence in the LifeSpan Biosciences databases. The sequences in FIG. 2 also include an identifier LPID, which is also an identification number assigned to the given sequence in the LifeSpan Biosciences databases. FIG. 3 depicts GPCRs for which it has been reported that antibodies are commercially available, SEQ ID NOS. 1, 3, 5, 11, 13, 15, 21, 23, 25, 27, 29, 31, 35, 37, 39, 41, 43, 45, 49, 51, 53, 57, 59, 61, 63, 65, 67, 69, 70, 71, 73, 75, 77, 79, 83, 85, 97, 99, 101, 103, 105, 107, 113, 115, 117, 121, 125, 135, 139, 143, 145, 147, 151, 155, 157, 159, 161, 169, 171, 173, 175, 177, 183, 185, 187, 189, 191, 192, 194, 200, 202, 206, 208, 214, 216, 218, 228, 236, 238, 240, 248, 250, 264, 295, 299, 301, 305, 311, 313, 315, 317, 319, 321, 323, 325, 327, 329, 331, 333, 335, 337, 347, 349, 351, 361, 365, 367, 369, 371, 377, 379, 385, 387, 389, 391, 397, 423, 435, 439, 457, 459, 461, 462, 468, 470, 472, 503, 507, 515, 535, 537, 546, 548, 552, 562, 628, 636; Applicants do not represent that any of the antibodies in FIG. 3 that such antibodies are actually commercially available nor that they have any significant specificity nor affinity for the GPCRs reported. For GPCRs for which no antigens or antibodies were previously known, the present invention provides valuable antigenic peptides and antibodies (see, e.g., SEQ ID NOS. 704-712, 731-743, 774-777, 803-806, 821-824, 876-879, 890-916, 942-949, 965-970, 985-988, 994-1009, 1014-1020, 1025-1028, 1044-1048, 1053-1056, 1073-1086, 1114-1123, 1152-1160, 1173-1178, 1188-1197, 1210-1227, 1232-1244, 1258-1270, 1280-1303, 1309-1368, 1373-1377, 1386-1389, 1394-1402, 1462-1482, 1496-1525, 1542-1549, 1557-1563, 1583-1649, 1656-1679, 1684-1688, 1693-1732, 1744-1752, 1765-1839, 1846-1854, 1855-1866, 1871-1917, 1926-1941, 1952-1955, 1960-1980, 1985-2141, 2152-2165, and 2170-2292.); for GPCRs for which antigens or antibodies are known, the present invention provides improved antigens in the form of antigenic peptides and improved antibodies (see, e.g., SEQ ID NOS. 692-703, 713-730, 744-802, 807-820, 825-875, 880-889, 917-941, 950-964, 971-984, 989-993, 1010-1013, 1021-1024, 1029-1043, 1049-1052, 1057-1072, 1087-1113, 1124-1151, 1161-1172, 1179-1187, 1198-1209, 1228-1231, 1245-1257, 1271-1279, 1304-1308, 1369-1372, which are antigenic peptides derived from GPCRs for which antibodies are reportedly commercially available). The antigenic peptides and antibodies, and uses and assays, etc., related to the antigenic peptides, are discussed further below.

[0115] The discussion herein, including the following passages, has been separated by headings for convenience. The disclosure under a given heading is not restricted to that heading. For example, the discussion in the definitions section is a part of the disclosure of the invention, the discussion on antigenic peptides also contains discussion related to probes and diagnostics, and the discussion on antibodies contains discussion related to therapeutic compositions, etc.

[0116] B. Definitions

[0117] The following paragraphs provide a non-exhaustive list of definitions of some of the terms and phrases as used herein. All terms used herein, including those specifically described below in this section, are used in accordance with their ordinary meanings unless the context or definition indicates otherwise. Also unless indicated otherwise, except within the claims, the use of “or” includes “and” and vice-versa. Non-limiting terms are not to be construed as limiting unless expressly stated (for example, “including” means “including without limitation” unless expressly stated otherwise).

[0118] The terms set forth in this application are not to be interpreted in the claims as indicating a “means plus function” relationship unless the word “means” is specifically recited in a claim, and are to be interpreted in the claims as indicating a “means plus function” relationship where the word “means” is specifically recited in a claim. Similarly, the terms set forth in this application are not to be interpreted in method or process claims as indicating a “step plus function” relationship unless the word “step” is specifically recited in the claims, and are to be interpreted in the claims as indicating a “step plus function” relationship where the word “step” is specifically recited in a claim.

[0119] “Agonist” indicates a substance, such as a molecule or compound, that interacts with a particular GPCR, for example by binding to the GPCR, to activate, increase, or prolong the amount or the duration of the effect of the biological activity or functionality of the GPCR. Agonists include proteins, nucleic acids, carbohydrates, or any other molecules that bind to and positively modulate the effect of the GPCR. Agonists and other modulators of the particular GPCR can be identified using in vitro or in vivo assays for G protein-coupled receptor expression or G protein-mediated signaling. For example, assays for agonists and other modulators include expressing a particular GPCR in cells or cell membranes, applying putative modulator compounds in the presence or absence of a specific known or putative ligand and then determining the functional effects on the particular GPCR-mediated signaling. Samples or assays comprising a particular GPCR that are treated with a potential agonist or other modulator are compared to control samples without the agonist or other modulator to examine the extent of modulation. Control samples can be assigned a relative activity value for the particular GPCR of 100%. Agonist activity on a particular GPCR is achieved when the G protein-coupled receptor activity value relative to the control is at least about 110%, optionally about 150%, preferably about 200-500%, or about 1000-3000% or higher. Down-modulation (for example by an antagonist) of a particular GPCR is achieved when the particular GPCR activity value relative to the control is at most about 90%, typically about 80%, optionally about 50% or about 25-0% of the 100% value.

[0120] “Aggregate,” see Complex.

[0121] “Algorithm” refers to a detailed sequence of actions to perform to accomplish some task. In computer programming, refers to instructions given to the computer.

[0122] “Allele” or “allelic sequence” indicates an alternative form of the gene encoding the GPCR. Alleles may result from at least one mutation in the nucleic acid sequence and may result in altered mRNAs or in polypeptides whose structure or function may or may not be altered. Any given natural or recombinant gene may have none, one, or many allelic forms. Common mutational changes that give rise to alleles are generally ascribed to natural deletions, additions, or substitutions of nucleotides. Each of these types of changes may occur alone or in combination with the others, one or more times in a given sequence.

[0123] “Altered” nucleic acid sequences encoding the GPCR include those sequences with deletions, insertions, or substitutions of different nucleotides, resulting in a polynucleotide encoding the same GPCR or a polypeptide variant with at least one substantial structural or functional characteristic of the GPCR. Included within this definition are polymorphisms that may or may not be readily detectable using a particular oligonucleotide probe against the polynucleotide encoding the GPCR. “Altered” proteins may contain deletions, insertions, or substitutions of amino acid residues that produce a silent change and result in a functionally equivalent GPCR. Deliberate amino acid substitutions may be made on the basis of similarity in polarity, charge, solubility, hydrophobicity, hydrophilicity, or the amphipathic nature of the residues, as long as the biological or immunological activity of the GPCR is retained. For example, negatively charged amino acids may include aspartic acid and glutamic acid, positively charged amino acids may include lysine and arginine, and amino acids with uncharged polar head groups having similar hydrophilicity values may include leucine, isoleucine, and valine; glycine and alanine; asparagine and glutamine; serine and threonine; and phenylalanine and tyrosine.

[0124] “Alternative splicing” refers to different ways of cutting and assembling exons to produce mature mRNAs.

[0125] “Amino acid” refers generally to any of a class of organic compounds that contains at least one amino group, —NH₂, and one carboxyl group, —COOH. The alpha-amino acids, RCH(NH₂)COOH, are the building blocks from which proteins are typically constructed. Amino acid can also refer to artificial chemical analogues or mimetics of a given amino acid as described, depending on the context.

[0126] “Amino acid sequence” refers to a string of amino acids, such as an oligopeptide, peptide, polypeptide, or protein sequence, or a fragment of any of these, including naturally occurring or synthetic molecules and those comprising an artificial chemical analogue or mimetic of a given amino acid. In this context, “biologically active fragments,” “biologically functional fragments,” “immunogenic fragments,” and “antigenic fragments” refer to fragments of the GPCR that are preferably about 15, 25, or 50 or more amino acids in length and that retain a substantial amount of such activity of the GPCR. Where “amino acid sequence” refers to an amino acid sequence of a naturally occurring protein molecule, “amino acid sequence” and like terms are not necessarily limited to the complete native amino acid sequence associated with the recited protein molecule.

[0127] “Amplification” indicates the production of additional copies of something, such as a nucleic acid sequence. Amplification can be generally carried out using polymerase chain reaction (PCR) technologies or other technologies such as the cycling probe reaction (CPR) that are well known in the art. See, e.g., Dieffenbach, C. W. and G. S. Dveksler, PCR Primer, a Laboratory Manual, pp.1-5, Cold Spring Harbor Press, Plainview, N.Y. (1995); U.S. Pat. Nos. 5,660,988, 5,731,146 and 6,136,533.

[0128] “Amplification primers” are oligonucleotides such as natural, analog or artificially created nucleotides that can serve as the basis for the amplification of a selected nucleic acid sequence. They include, for example, both PCR primers and ligase chain reaction oligonucleotides.

[0129] “Analog” or “variant” indicates a GPCR or antigenic peptide that has been modified by deletion, addition, modification, or substitution of one or more amino acid residues compared to the wild-type sequence. Analogs encompass allelic and polymorphic variants, and also muteins and fusion proteins that comprise all or a significant part of such GPCR, e.g., covalently linked via side-chain group or terminal residue to a different protein, polypeptide, or moiety (fusion partner). Variants of a particular GPCR protein refer to an amino acid sequence that is altered by one or more amino acids, for example by one or more amino acid substitution, insertion, deletion or modification, or proteins with or without associated native-pattern glycosylation. The variant may have “conservative” changes. Such “conservative” changes generally are well known in the art and readily determinable for a particular GPCR in view of the present application. Conservative changes include, for example, substitutions where a substituted amino acid has similar structural or chemical properties to the amino acid it replaced (e.g., negatively charged amino acids include aspartic acid and glutamic acid; positively charged amino acids include lysine, arginine, histidine, asparagine, and glutamine; amino acids containing sulfur include methionine and cysteine; polar hydroxy amino acids include serine, threonine, and tyrosine; large hydrophobic amino acids include phenylalanine and tryptophan; small hydrophobic amino acids include alanine, leucine, isoleucine, and valine). A variant may also have “nonconservative” changes which means that the replacement amino acid provides some substantial change in the amino sequence.

[0130] A variant preferably retains at least about 90% identity, and more preferably at least about 95% identity. Within certain embodiments, such variants contain alterations such that the ability of the variant to induce an immunogenic response is not substantially eliminated; in some embodiments the ability to an immunogenic response is not substantially diminished. Modifications of amino acid residues may include but are not limited to aliphatic esters or amides of the carboxyl terminus or of residues containing carboxyl side chains, O-acyl derivatives of hydroxyl group-containing residues, and N-acyl derivatives of the amino-terminal amino acid or amino-group containing residues, e.g., lysine or arginine. Guidance in determining which and how many amino acid residues may be substituted, inserted, deleted or modified without diminishing immunological or biological activity may be found in view of the present application using any of a variety of methods and computer programs known in the art, for example, DNASTAR software. Properties of a variant may generally be evaluated by assaying the reactivity of the variant with, for example, antibodies as described herein or evaluating a biological activity characteristic of the native protein as described herein or as known in the art in view of the present application. Certain polynucleotide variants are capable of hybridizing under appropriately stringent conditions to a naturally occurring DNA sequence encoding a particular GPCR protein (or a complementary sequence). Such hybridizing nucleic acid sequences are also within the scope of this invention.

[0131] “Antagonist” refers to a molecule which interacts with a particular GPCR, for example by binding to the particular GPCR, and prevents, inactivates, decreases or shortens the amount or the duration of the effect of the biological activity of the GPCR. Antagonists include proteins, nucleic acids, carbohydrates, antibodies, or any other molecules that so affect the GPCR. Antagonists can be identified, for example, using appropriate screens corresponding to those described for agonists above and elsewhere herein or as would be apparent to those skilled in the art in view of the present application.

[0132] “Antibody” indicates one type of binding partner, typically encoded by an immunoglobulin gene or immunoglobulin genes, and refers to, for example, intact monoclonal antibodies (including agonist and antagonist antibodies), polyclonal antibodies, phage display antibodies, and multispecific antibodies (e.g., bispecific antibodies) formed, for example, from at least two intact antibodies. Antibody also refers to fragments thereof, which comprise a portion of an intact antibody, generally the antigen-binding or variable region of the intact antibody that are capable of binding the epitopic determinant. Examples of antibody fragments include Fab, Fab′, F(ab′)₂, and Fv fragments, diabodies, linear antibodies, single-chain antibody molecules, and multispecific antibodies formed from antibody fragments. See U.S. Pat. No. 6,214,984. Antibody fragments may be synthesized by digestion of an intact antibody or synthesized de novo either chemically or utilizing recombinant DNA technology. Antibodies according to the present invention have at least one of adequate specificity, affinity and capacity to perform the activities desired for the antibodies. Antibodies can, for example, be monoclonal, polyclonal, or combinatorial. Antibodies that bind GPCR polypeptides can be prepared using intact polypeptides or using fragments containing small peptides of interest as the immunizing antigen. The polypeptide or oligopeptide used to immunize an animal (e.g., a mouse, a rat, or a rabbit) can be derived from the translation of RNA, or synthesized chemically, and can be conjugated to a carrier protein if desired. Commonly used carriers that are chemically coupled to peptides include bovine serum albumin, thyroglobulin, and keyhole limpet hemocyanin (KLH). The coupled peptide is then used to immunize the animal.

[0133] “Antigenic determinant” refers to the antigen recognition site on an antigen (i.e., epitope). Such antigenic determinant may also be immunogenic.

[0134] “Antisense” refers to any composition containing a nucleic acid sequence that is complementary to a specific nucleic acid sequence. “Antisense strand” refers to a nucleic acid strand that is complementary to the “sense” strand. Antisense molecules may be produced by any method including transcription or synthesis including synthesis by ligating the gene(s) of interest in a reverse orientation to a desired promoter that permits the synthesis of a complementary strand. Once introduced into a cell, the complementary nucleotides can combine with natural sequences produced by the cell to form duplexes and to block either transcription or translation. The designation “negative” can refer to the antisense strand, and the designation “positive” can refer to the sense strand.

[0135] “Biologically active” or “biologically functional,” when referring to an antigenic peptide, indicates that the antigenic peptide induces an immunogenic response specific for the antigenic peptide and thus for the GPCR from which is was obtained. A variant, fragment, etc., of an antigenic peptide is “biologically active” or “biologically functional” if the ability to induce the specific immunogenic response is not substantially diminished. The term “not substantially diminished” means retaining a functionality that is at least about 90% of the functionality of the native antigenic peptide. Appropriate assays designed to evaluate such functionality may be designed based on existing assays known in the art in view of the present application, or on the representative assays provided herein.

[0136] “Annotation” refers to the provision of helpful or identifying information about a GPCR or other open reading frame (ORF), such as locus name, key words, and Medline references.

[0137] “BLAST” refers to the Basic Local Alignment Search Tool, which is a technique for detecting ungapped sub-sequences that match a given query sequence. BLAST can be used as a preliminary step for detecting ORF boundaries.

[0138] “BLASTP” refers to a BLAST program that compares an amino acid query sequence against a protein sequence database.

[0139] “BLASTX” refers to a BLAST program that compares the six-frame conceptual translation products of a nucleotide query sequence (both strands) against a protein sequence database. BLASTX can be used to create a sub-database of ORFs which may exist on a contig, and to identify the best match between one of these ORFs and a sequence in an external database.

[0140] “Buffer” refers to a component in a solution to provide a buffered solution that resists changes in pH by the action of its acid-base conjugate components.

[0141] “CDS” refers to the GenBank DNA sequence entry for coding sequence. A coding sequence is a sub-sequence of a DNA sequence that is surmised to encode a gene. A complete gene coding sequence begins with an “ATG” and ends with a stop codon.

[0142] “Clone” in molecular biology refers to a vector carrying an insert DNA sequence.

[0143] “Cloning” in molecular biology refers to a recombinant DNA technique used to produce multiple, up to millions or more, copies of a DNA sequence. The DNA sequence is inserted into a small carrier or vector (e.g., plasmid, bacteriophage, or virus) and inserted into a host cell for amplification or expression.

[0144] “Cluster” refers to a group of ORFs related to one another by sequence homology. Clusters are generally determined by a specified degree of homology and overlap (e.g., a stringency).

[0145] “Comparison window” indicates a segment of any one of the number of contiguous positions selected from the group consisting of from 20 to 600, usually about 50 to about 200, more usually about 100 to about 150 in which a sequence may be compared to a reference sequence of the same number of contiguous positions after the two sequences are aligned to enhance sequence similarity. Methods of alignment of sequences for comparison will be readily apparent to a person of ordinary skill in the art in view of the present application.

[0146] “Complementary” or “complementarity” refers to the natural binding of polynucleotides by base pairing. For example, the sequence “A-G-T” binds to the complementary sequence “T-C-A.” Complementarity between two single-stranded molecules may be “partial,” such that only some of the nucleic acids bind, or it may be “complete,” such that all of the nucleotides of at least one of the single-stranded molecules binds to corresponding nucleotides of the other single-stranded molecule. The degree of complementarity between nucleic acid strands has significant effects on the efficiency and strength of the hybridization between the nucleic acid strands. This can be of particular importance in amplification reactions, which can depend upon binding between nucleic acids strands, and in the design and use of peptide nucleic acid (PNA) molecules.

[0147] “Complex,” or “aggregate,” indicates a dimer or multimer formed between at least two proteins or other macromolecules, for example a GPCR and its ligand.

[0148] “Composition” indicates a combination of multiple substances into a mixture.

[0149] “Composition comprising a given amino acid sequence” refers broadly to any composition containing the given amino acid sequence. The composition may comprise a dry formulation, an aqueous solution, or a sterile composition.

[0150] “Consensus sequence” refers to the sequence that reflects the most common choice of base or amino acid at each position from a series of related DNA, RNA, or protein sequences. Areas of particularly good agreement often represent conserved functional domains. The generation of consensus sequences has typically been subjected to intensive mathematical analysis.

[0151] “Conservative changes” to an amino acid sequence, see Analog.

[0152] “Deletion” refers to a change in the amino acid or nucleotide sequence that results in the absence of one or more amino acid residues or nucleotides.

[0153] “Derivative” refers to chemical modification of an antigenic peptide, or of an antibody specific for and created from the antigenic peptide. A derivative peptide can be modified, for example, by glycosylation or pegylation.

[0154] “Diabodies” refers to one type of antibody comprising small antibody fragments with two antigen-binding sites, which fragments comprise a heavy-chain variable domain (VH) connected to a light-chain variable domain (VL) on the same polypeptide chain (VH-VL). By using a linker that is too short to allow pairing between the two domains on the same chain, the domains pair with the complementary domains of another chain and create two antigen-binding sites. Diabodies are described, for example, in EP 404,097; WO 93/11161; and Holliger et al., Proc. Natl. Acad. Sci. USA, 90:6444-6448 (1993).

[0155] “Database” refers to a structured format for organizing and maintaining information or data, a collection of data records, in a computer-readable form that can be rapidly and easily retrieved. A database is typically stored in a computer-readable memory. Records may comprise web pages, graphics, audio files, text files, or links. Records may or may not be further broken into fields. Database records are usually indexed and come with a search interface to find records of interest.

[0156] “E-value” refers to a result of a FASTA analysis. The number indicates the probability that a match between two sequences is due to random chance.

[0157] “Expression vector” is a specialized vector constructed so that the gene inserted in the vector can be expressed in the cytoplasm of a host cell.

[0158] “FASTA” refers to a modular set of sequence comparison programs used to compare an amino acid or DNA sequence against all entries in a sequence database. FASTA was written by Professor William Pearson of the University of Virginia Department of Biochemistry. The program uses the rapid sequence algorithm described by Lipman and Pearson (1988) and the Smith-Waterman sequence alignment protocol. FASTA performs a protein to protein comparison.

[0159] “FASTX” refers to a module of the FASTA protocol used to define optimal ORF boundaries while searching for genes. FASTX uses a nucleotide to protein sequence comparison.

[0160] “Fragment,” see Portion.

[0161] “GenBank” refers to a family of public databases comprising nucleic acid and amino acid sequence information, including the GenPept bacterial peptide database.

[0162] “Gene” refers to the basic unit of heredity that carries the genetic information for a given RNA or protein molecule. A gene is composed of a contiguous stretch of DNA and contains a coding region that is flanked on each end by regions that are transcribed but not translated. A gene is a segment of DNA involved in producing a biologically active or biologically functional polypeptide chain.

[0163] “Heterologous” indicates a nucleic acid that comprises two or more subsequences that are not found in the same relationship to each other in nature. For instance, the nucleic acid is typically recombinantly produced, having two or more sequences from unrelated genes arranged to make a new functional nucleic acid, e.g., a promoter from one source and a coding region from another source. Similarly, a heterologous protein indicates that the protein comprises two or more subsequences that are not found in the same relationship to each other in nature (e.g., a fusion protein).

[0164] “Hit Threshold” refers to a pre-set E-value or P-value for evaluating sequence matches. For example, this value can be set at le-6 for finding genes; and at le-15 for clustering genes.

[0165] “Homology” refers to a degree of complementarity. There may be partial homology or complete homology. The word “identity” may substitute for the word “homology.” A partially complementary sequence that at least partially, and substantially, inhibits a corresponding sequence from hybridizing to a target nucleic acid is referred to as “substantially homologous.”The inhibition of hybridization of the completely complementary sequence to the target sequence may be examined using a hybridization assay (e.g., Southern or Northern blot, in situ hybridization, solution hybridization) under conditions of reduced stringency. A substantially homologous sequence or hybridization probe will compete for and inhibit the binding of a completely homologous sequence to the target sequence under stringency conditions that inhibit non-specific binding but permit specific binding. The absence of non-specific binding may be tested by the use of a second target sequence which lacks even a partial degree of complementarity (e.g., less than about 30% homology or identity). In the absence of non-specific binding, the substantially homologous sequence or probe will not hybridize to the second, non-complementary target sequence.

[0166] “Humanized antibody” refers to antibody molecules in which the amino acid sequence in the non-antigen-binding regions has been altered so that the antibody more closely resembles a human antibody, and still retains its original binding ability. Typically, humanized antibodies are human immunoglobulins (recipient antibody) in which residues from a complementarity-determining region (CDR) of the recipient are replaced by residues from a CDR of a non-human species (donor antibody) such as mouse, rat or rabbit having the desired specificity, affinity, and capacity. In some instances, Fv framework residues of the human immunoglobulin are replaced by corresponding non-human residues. Furthermore, humanized antibodies may comprise residues that are found neither in the recipient antibody nor in the imported CDR or framework sequences. These modifications are typically made to further refine and optimize antibody performance. In general, the humanized antibody will comprise substantially all of at least one, and typically two, variable domains, in which all or substantially all of the CDR regions correspond to those of a non-human immunoglobulin and all or substantially all of the framework (FR) regions are those of a human immunoglobulin sequence. The humanized antibody optimally also will comprise at least a portion of an immunoglobulin constant region (Fc), typically that of a human immunoglobulin. For further details see, e.g., Jones et al., Nature, 321:522-525 (1986); Reichmann et al., Nature, 332:323-329 (1988); and, Presta, Curr. Op. Struct. Biol., 2:593-596 (1992).

[0167] “Identity,” see Homology.

[0168] “Immunocytochemistry” refers to the use of immunologic methods, including a specific antibody, to study cell constituents.

[0169] “Immunohistochemistry” refers to the use of immunologic methods, including a specific antibody, to study specific antigens in tissue slices.

[0170] “Immunolocalization” refers to the use of immunologic methods, including a specific antibody, to locate molecules or structures within cells or tissues.

[0171] “Immunologically active” refers to the capability of a natural, recombinant, or synthetic GPCR, or any immunogenic fragment thereof, to induce a specific immune response in appropriate animals or cells and to bind with specific antibodies. A polypeptide is “immunologically active” if it is recognized by (e.g., specifically bound by) a B-cell or T-cell surface antigen receptor. Immunological activity may generally be assessed using well known techniques, such as those summarized in Paul, Fundamental Immunology, 3rd ed., 243-247, Raven Press (1993) and references cited therein. Such techniques include screening polypeptides derived from the native polypeptide for the ability to react with antigen-specific antisera or T-cell lines or clones, which may be prepared in view of the present application using well known techniques. Preferably, an immunologically active portion of a GPCR protein reacts with such antisera or T-cells at a level that is not substantially lower than the reactivity of the full-length polypeptide (e.g., in an ELISA or T-cell reactivity assay). Such screens may generally be performed using methods well known to those of ordinary skill in the art in view of the present application, such as those described in Harlow and Lane, Antibodies: A Laboratory Manual, Cold Spring Harbor Press (1988). B-cell and T-cell epitopes may also be predicted via computer analysis.

[0172] “Immune response” refers to any of the body's immunologic reactions to an antigen such as antibody formation, cellular immunity, hypersensitivity, or immunological tolerance.

[0173] “Insertion” and “addition” when referring to a change in a nucleotide or amino sequence indicate the addition of one or more nucleotides or amino acid residues, respectively, to the sequence.

[0174] “In situ hybridization” refers to use of a nucleic acid probe, typically a DNA or RNA probe, to detect the presence of a DNA or RNA sequence in target cells such as cloned bacterial cells, cultured eukaryotic cells, or tissue samples. In situ hybridization can also be used for locating genes on chromosomes. The process can be performed by preparing a microscope slide with cells in metaphase of mitosis, then treating slide with a weak base to denature the DNA. Next, pour radioactively labeled probe onto the slide under hybridizing conditions, expose the slide to a photographic emulsion for a suitable period such as a few days or weeks, then develop the emulsion.

[0175] “Isoform” refers to different forms of a protein that may be produced from different genes or from the same gene by alternative RNA splicing.

[0176] “Isolated” generally means that the material is removed from its original environment (e.g., the natural environment if it is naturally occurring).

[0177] “Library” refers physically to a pool of nucleic acid fragments that has been propagated in a cloning vector. Library can also refer to an electronic collection of genomic or proteomic sequence data, including raw sequences, contigs, ORFs and loci from a specific organism.

[0178] “Ligand” refers to an ion or molecule that binds with another molecule, such as a GPCR, to form a macromolecule such as a receptor-ligand complex. An “endogenous ligand” refers to a native ligand that binds to the receptor of the GPCR and modulates biological activity or functionality of the GPCR in its native environment. A “specific ligand” is a ligand able to bind to a particular GPCR and modulate the biological activity or functionality of the particular GPCR; an endogenous ligand is one example of a specific ligand.

[0179] “Microarray” refers to an array of distinct nucleic acid or amino acid molecules arrayed on a substrate, such as paper, nylon or any other type of membrane, filter, chip, glass slide, or any other suitable solid support. Microarrays can also refer to tissue microarrays, composed of small tissue pieces arranged on a slide. U.S. Pat. No. 5,143,854 and PCT Patent Publication Nos. WO 90/15070 and 92/10092.

[0180] “Mimetic” refers to a molecule, e.g., a peptide or non-peptide agent, such as a small molecule, that is able to perform the same biological activity as a certain biologically active agent. For example, some mimetics are molecules comprising the same biological function or activity as the particular GPCR. The structure of the mimetic can be developed from knowledge of the structure of the particular GPCR or portions thereof. For appropriate mimetics, the mimetic is able to effect some or all of the actions of a given antigenic peptide or antibodies against the angtigenic peptide. Such mimetics can be made, in view of the present application, using techniques well known in the art, see, e.g., U.S. Pat. Nos. 6,197,752; 6,093,697; 6,207,643; 5,849,323, and can be included in the various processes, methods, and systems, etc., described herein, such as databases, binding partner assays, probes, medicaments, and therapeutics.

[0181] “Modulate” refers to controllably changing the activity of a substance or other item, such as the biological activity of a GPCR, antigenic peptide or corresponding antibody. For example, modulation may cause an increase or a decrease in protein activity, binding characteristics, or other biological, functional, or immunological properties of the GPCR.

[0182] “Monoclonal antibody” refers to an antibody obtained from a population of substantially homogeneous antibodies, e.g., the individual antibodies comprising the population are identical except for possible naturally occurring mutations that may be present in minor amounts. Monoclonal antibodies include “chimeric” antibodies (immunoglobulins) in which a portion of the heavy or light chain is identical with or homologous to corresponding sequences in antibodies derived from a particular species or belonging to a particular antibody class or subclass, while the remainder of the chain(s) is identical with or homologous to corresponding sequences in antibodies derived from another species or belonging to another antibody class or subclass, as well as fragments of such antibodies, so long as they exhibit the desired biological activity. U.S. Pat. No. 4,816,567; Morrison et al., P.N.A.S. USA, 81:6851-6855 (1984). Monoclonal antibodies are highly specific, being directed against a single antigenic site. As a matter of distinction, polyclonal antibody preparations typically include different antibodies directed against different determinants (epitopes) of a target antigen whereas each monoclonal antibody is directed against a single determinant on the antigen. Monoclonal antibodies can be synthesized by hybridoma culture, uncontaminated by other immunoglobulins. For example, the monoclonal antibodies to be used in accordance with the present invention may be made by the hybridoma method first described by Kohler and Milstein, Nature, 256:495 (1975), or may be made by recombinant DNA methods. See, e.g., U.S. Pat. No. 4,816,567. Monoclonal antibodies may also be isolated from phage antibody libraries using the techniques described in Clackson et al., Nature, 352:624-628 (1991), and Marks et al., J. Mol. Biol., 222:581-597 (1991), for example. The modifier “monoclonal” indicates the character of the antibody as being obtained from a substantially homogeneous population of antibodies, and is not to be construed as requiring production of the antibody by any particular method.

[0183] “Nonconservative” changes to an amino acid sequence, see Analog.

[0184] “Northern blotting” or “Northern analysis” refers to a method used to detect specific RNA sequences. For example, the process can be performed by electrophoresing RNA in a denaturing agarose gel, transferring the gel onto a membrane, and hybridizing with a labeled RNA or DNA probe.

[0185] “Nucleic acid sequence” refers to a polymer comprising a string of “nucleic acids” such as an oligonucleotide, or a polynucleotide or fragment thereof. The nucleic acid sequence can be from DNA or RNA of genomic or synthetic origin, may be single-stranded or double-stranded, and may represent the sense or the antisense strand. A nucleic acid sequence can also be a PNA or a DNA-like or RNA-like material. Unless stated otherwise, the term encompasses nucleic acids containing known analogues or mimetics of natural nucleotides that have similar binding properties as the reference nucleic acid.

[0186] “Oligonucleotide” refers to a nucleic acid sequence, generally between 6 nucleotides to 60 nucleotides, preferably about 15 to 30 nucleotides, and most preferably about 20 to 25 nucleotides, that can, for example, be used in PCR or other nucleic acid amplification or in a hybridization assay or microarray. “Oligonucleotide” includes “amplimers,” “primers,” “oligomers,” and “probes,” as these terms are commonly defined in the art. Oligonucleotides can be chemically synthesized. Such synthetic oligonucleotides may have no 5′ phosphate and if so will not ligate to another oligonucleotide without adding a phosphate, typically by using an ATP in the presence of a kinase. A synthetic oligonucleotide will ligate to a fragment that has not been dephosphorylated.

[0187] “Operably linked” or “operably connected” indicates that one element of an apparatus, system, or method, etc., is connected to another element of the apparatus, system, or method, etc., such that the two elements are able to perform their intended purposes. For example, when a promoter is linked to a polynucleotide to allow transcription of the polynucleotide, it is “operably linked” to the polynucleotide.

[0188] “Orphan receptor” refers to a receptor for which the endogenous ligand or other ligands inducing biological activity are not known.

[0189] “PCR” or “polymerase chain reaction” refers to an in vitro method that uses oligonucleotide primers, enzymes, and a series of repetitive temperature cycles to generate millions of copies of a nucleic acid, typically DNA, from an original specimen of a specific DNA sequence, which specimen may be present only in a trace amount.

[0190] “Plasmids” refers to extrachromasomal genetic elements composed of DNA or RNA found in both eukaryotic and prokaryotic cells that can propagate themselves autonomously in cells. Plasmids can be used as carriers or vectors to clone DNA molecules. They are designated by a lower case p preceded or followed by capital letters or numbers. The starting plasmids herein are either commercially available, publicly available on an unrestricted basis, or can be constructed from available plasmids in accord with published procedures. In addition, equivalent plasmids to those described are known in the art and will be apparent to the ordinarily skilled artisan in view of the present application.

[0191] “Polynucleotide encoding a polypeptide” indicates a polynucleotide that includes only the coding sequence for the polypeptide as well as polynucleotides that include additional coding or non-coding sequence.

[0192] “Portion” or “fragment” with regard to a protein (as in “a portion of a given protein”) refers to parts of that protein, a subsequence of the complete amino acid sequence of the receptor containing at least about 8, usually at least about 12, more typically at least about 20, and commonly at least about 30 or more contiguous amino acid residues, up to the entire amino acid sequence minus one amino acid. Thus, a protein “comprising at least a portion of the amino acid sequence of SEQ ID NO:XX” or a protein “comprising at least a portion of the amino acid sequence of a particular GPCR” encompasses the full-length protein and fragments thereof. A portion or fragment of a nucleic acid refers to nucleic acid sequences that are greater than about 12 nucleotides in length, and typically at least about 60 or 100 nucleotides, generally at least about 1000 nucleotides, or at least about 10,000 nucleotides in length, up to the entire nucleic acid sequence minus one nucleic acid.

[0193] “P-value” is a statistical term used to indicate the probabilty that an event is due to random chance. When used in reference to a result of BLAST searches, the number indicates the probability that a match between two sequences is due to random chance.

[0194] “Receptor” refers to a molecular structure, typically within a cell or on a cell surface, that selectively binds a specific substance (a ligand) and a specific physiologic effect that accompanies the binding. GPCRs are a type of cell-surface receptor, which means a protein in, on, or traversing the cell membrane (in the case of GPCRs, traversing the cell membrane) that recognizes and binds to specific molecules in the surrounding fluid. The binding to a receptor may serve to transport molecules into the cell's interior or to signal the cell to respond in some way.

[0195] “Recombinant” refers to both a method of production and a structure. Some recombinant nucleic acids and proteins are made by the use of recombinant DNA techniques that involve human intervention, either in manipulation or selection. Others are made by fusing two fragments that are not naturally contiguous to each other. Engineered vectors are encompassed, as well as nucleic acids comprising sequences derived using any synthetic oligonucleotide process.

[0196] “Sample” is used in its usual broad sense. For example, a biological sample suspected of containing nucleic acids encoding the GPCR, or fragments thereof, or the GPCR itself, may comprise a bodily fluid; an extract from a cell, chromosome, organelle, or membrane from a cell; a cell; genomic DNA, RNA, or cDNA (in solution or bound to a solid support); a tissue; a tissue print, and the like. Biological sample refers to samples from a healthy individual as well as to samples from a subject suspected of having or susceptible to having, e.g., immune-related diseases, cell growth-related diseases, cell regeneration-related diseases, immunological-related cell proliferative diseases, and autoimmune diseases. Examples of specific diseases include AIDS, allergies, Alzheimer's disease, amyotrophic lateral sclerosis, atherosclerosis, bacterial, fungal, protozoan and viral infections, benign prostatic hypertrophy, bone diseases (e.g., osteoarthritis, osteoporosis), carcinoma (e.g., basal cell carcinoma, breast carcinoma, embryonal carcinoma, ovarian carcinoma, renal cell carcinoma, lung adenocarcinoma, lung small cell carcinoma, pancreatic carcinoma, prostate carcinoma, transitional carcinoma of the bladder, squamous cell carcinoma, thyroid carcinoma), cardiomyopathy, chronic and acute inflammation, circadian rhythm disorders, COPD, Crohn's disease, diabetes, Duchenne muscular dystrophy, embryonal carcinoma, endotoxic shock, environmental stress (e.g., by heat, UV or chemicals), gastrointestinal disorders, glioblastoma multiform, graft vs. host disease, Hodgkin's disease, inflammatory bowel disease, ischemia, stroke, lymphoma, macular degeneration, malignant cytokine production, malignant fibrous histiocytoma, melanoma, meningioma, mesothelioma, multiple sclerosis, nasal congestion, pain, Parkinson's disease, prostate carcinoma, psoriasis, rhabdomyosarcoma, psychotic or neurological disorders (e.g., anxiety, depression, schizophrenia, dementia, mental retardation, memory loss, epilepsy, locomotor problems, respiratory disorders, asthma, eating/body weight disorders including obesity, bulimia, diabetes, anorexia, nausea, hypertension, hypotension), renal disorders, reperfusion injury, rheumatoid arthritis, sarcoma (e.g., chondrosarcoma, Ewing's sarcoma, osteosarcoma), septicemia, seminoma, sexual/reproductive disorders, tonsil, transitional carcinoma of the bladder, transplant rejection, trauma, tuberculosis, ulcers, ulcerative colitis, urinary retention, vascular and cardiovascular disorders, or any other disease or disorder in which G protein-coupled receptors are involved, as well as learning and/or memory disorders, diabetes, pain perception disorders, anorexia, obesity, hormonal release problems, or any other disease or disorder in which a specific GPCR is involved.

[0197] “Second messengers” refer to intracellular signaling molecules such as cyclic AMP (cAMP), inositol triphosphate, diacylglycerol, or Ca²⁺. Second messengers, in turn, alter the activity of other intracellular proteins such as cAMP-dependent protein kinase and Ca²⁺/calmodulin-dependent protein kinases, leading to the transduction and amplification of the original extracellular signal.

[0198] “Southern blotting” refers to a method for detecting specific DNA sequences via hybridization. For example, a DNA sample can be electrophoresed in a denaturing agarose gel, transferred onto a membrane, and hybridized with a complementary nucleic acid probe. “Southern” when used in reference to a database indicates an electronic analog of the laboratory technique, which analysis can be used to identify libraries in which a given DNA sequence, such as a gene, EST, or ORF is present. The terms “Northern” and “Western” likewise can be used for electronic analogs to the respective laboratory techniques described above.

[0199] “Specific binding” or “specifically binding” refers to an interaction between protein or peptide and a certain substance, such as its specific ligand or antibody, and in some cases its agonists or antagonists. The interaction is dependent upon the presence of a particular structure of the protein recognized by the binding molecule (e.g., the antigenic determinant or epitope). For example, if an antibody specifically binds epitope “A,” the presence of a polypeptide containing epitope A or the presence of free unlabeled epitope A will reduce the amount of labeled epitope A that binds to the antibody in a reaction containing free labeled epitope A and the antibody. Conversely, the presence of a polypeptide that does not contain epitope A will not reduce the amount of labeled epitope A that binds to the antibody. Highly specific binding indicates that the protein or peptide binds to its particular ligand, antibody, etc., and does not bind in a significant amount to other proteins present in the sample. Typically, a specific or selective reaction will be at least twice the background signal or noise and more typically more than 10 to 100 times the background signal or noise.

[0200] “Stringent conditions” refer to conditions that permit hybridization between complementary polynucleotide sequences. Suitably stringent conditions can be defined by, for example, the concentrations of salt or formamide in the prehybridization and hybridization solutions, or by the hybridization temperature. Stringency can be increased by reducing the concentration of salt, increasing the concentration of formamide, or raising the hybridization temperature. Stringent conditions are dependent upon the type of probe as well as the length of the probe and the GC content of the probe. “Stringent conditions” typically occur within a range from about Tm-5° C. (5° C. below the melting temperature (Tm) of the probe) to about Tm-20-25° C. for a cRNA probe and to about Tm-15° C. for an oligonucleotide probe. “Highly stringent conditions” refers to conditions under which a probe will hybridize to its target sequence, typically in a complex mixture of nucleic acid sequences, but will not substantially hybridize to other sequences. One example of high stringency conditions for a cRNA probe that is 1,000 nucleotides in length and has a GC content of about 60% is about 55-65° C. in 50% formamide, 0.1×SSC, and 200 μg/ml sheared and denatured salmon sperm DNA. One example of low stringency conditions for the same probe in 50% formamide, 0.1×SSC, and 200 μg/ml sheared and denatured salmon sperm DNA would be 30-35° C. “Very highly stringent conditions” indicates that there must be complete identity between the sequences. The temperature range corresponding to a particular level of stringency can be narrowed further by calculating the purine to pyrimidine ratio of the nucleic acid of interest and adjusting the temperature accordingly. Variations on and modifications of the above ranges and conditions will be readily appreciated by those of skill in the art in view of the present application. As will be understood by those of skill in the art in view of the present application, the stringency of hybridization can be altered to identify or detect identical or related polynucleotide sequences. One guide for nucleic acid hybridization is Tijssen, Laboratory Techniques in Biochemistry and Molecular Biology-v.24 Hybridization with Nucleic Acid Probes, Part I “Overview of principles of hybridization and the strategy of nucleic acid assays” (New York: Elsevier 1993).

[0201] “Substantially purified” refers to nucleic acid or amino acid sequences that are removed from their natural environment and are separated from other components from such natural environment, and are at least about 60% free, preferably about 75% or 85% free, and most preferably about 90%, 95% or 99% free from such other components with which they are naturally associated. Substantially purified preferably indicates a substantially homogeneous state and can be in either a dry or aqueous solution or other composition as desired. Purity and homogeneity can be assayed by standard methods, for example on a mass or molar basis, using analytical chemistry techniques such as polyacrylamide gel electrophoresis or high performance liquid chromatography.

[0202] “Substitution” when referring to a change in a nucleotide or amino sequence indicates the replacement of one or more nucleotides or amino acids by different nucleotides or amino acids, respectively.

[0203] “Variant,” see Analog.

[0204] “Western blotting” or “Western analysis” refers to a method for detecting specific protein sequences. For example, the process can be performed by electrophoresing a protein mixture in a denaturing agarose or acrylamide gel, transferring the mixture onto a membrane, and incubating it with an antibody raised against the protein of interest.

[0205] Other terms and phrases are defined in other portions of this application.

[0206] C. Selection of Desired Antigenic Peptides for GPCRs and Other Polypeptides

[0207] The present invention provides improved antigenic peptides, for example as set forth in FIG. 2, SEQ ID NOS. 692-2292, and improved methods of identifying such antigenic peptides from known or publicly available sequences of polypeptides or proteins, i.e., from a candidate polypeptide sequence. Polypeptide and protein are used in their traditional sense to indicate lengthy amino acid molecules, whereas the antigenic peptide has a length significantly less than the length of the corresponding polypeptide or protein such that the antigenic peptide is capable of providing significantly improved antigenicity relative to the corresponding polypeptide or protein, typically improved specificity, affinity or avidity. The candidate polypeptide can be, for example, a human protein or polypeptide, a naturally occurring protein or polypeptide or a synthetic or recombinant protein or polypeptide.

[0208] The antigenic peptides are typically 5 to about 100 amino acids in length, preferably 6 to about 50 amino acids, and further preferably 7 to about 20 amino acids. The antigenic peptides include short antigenic amino acid sequences (i.e., peptides comprising only a portion of an antigenic sequence as set forth in FIG. 2 or as identified using the methods described herein, plus an insignificant number of additional amino acids at one or both ends, where insignificant indicates that the extra amino acids do not substantially interfere with the antigenicity of the antigenic peptide). Such short antigenic peptides can be identical to at least 5, 6, 7 or more consecutive amino acids of the sequences herein or identified using the methods described herein, or can have one or two (or more, with increasing length) conservative amino acid substitution for antigenic peptides comprising more than 6 or 7 consecutive amino acids of the sequences herein or identified using the methods described herein. Antigenic peptides and sequences, and related antibodies and assays and the like, are discussed further elsewhere herein with regard to GPCRs, but such discussions applies to all antigenic peptides produced according to the methods herein, including proteins and polypeptides such as kinases, phosphatases and any other desired protein or polypeptide.

[0209] The identification or selection methods comprise searching the candidate polypeptide sequence using a comparison window of the desired length, then selecting against or rejecting amino acid sequences of the length and having at least 1 characteristic selected from the group consisting of 1) at least two consecutive prolines, 2) at least two consecutive serines, 3) at least two consecutive lysines, 4) at least two consecutive arginines, 5) at least two consecutive aspartic acids, 6) at least two consecutive glutamic acids, 7) methionine, 8) tryptophan, and 9) at least five consecutive amino acids comprising no charged amino acids. Preferably, at least 5, 7, 8, or all of the characteristics are selected.

[0210] The identification or selection methods can also comprise selecting against amino acid sequences having at least 5 consecutive amino acids that are identical to an alternative amino acid sequence from an alternative polypeptide, i.e., some polypeptide other than the candidate polypeptide from which the selected antigen was derived, that is different from the candidate polypeptide, posttranslational modification sites, or highly hydrophobic sequences, which indicates sequences adequately hydrophobic to be located in a lipid membrane such as a cellular membrane. The posttranslational modification sites can be phosphorylation or glycosylation sites.

[0211] The methods can further comprise performing a BLAST-type or a FAST-type analyses for the candidate polypeptide sequence. Exemplary BLAST-type and FAST-type analyses are described above, including BLAST, BLASTP, BLASTX, FASTA, and FASTX.

[0212] D. General Discussion of Antigenic Peptides Related to Particular GPCRs

[0213] Antigenic Peptides Generally:

[0214] The present invention includes antigenic peptides able to induce specific immunogenic responses, and corresponding binding partners. Such antigenic peptides and binding partners can be cloned, expressed, isolated, purified, and otherwise obtained or manipulated according to routine methods known in the art in view of the present application.

[0215] The present invention further relates to antigenic peptides having an amino acid sequence from a particular GPCR, including analogs, mimetics, fragments, derivatives, and the like of such antigenic peptides. See SEQ ID NOS. 1-2292, FIGS. 1-3. The antigenic peptides may be recombinant, natural or synthetic. The antigenic peptides include (i) antigenic peptides in which one or more of the amino acid residues are substituted with a conserved or non-conserved amino acid residue (preferably a conserved amino acid residue) and such substituted amino acid residue may or may not be one encoded by the genetic code, (ii) antigenic peptides in which one or more of the amino acid residues includes a substituent group, (iii) antigenic peptides in which the mature polypeptide is complexed (e.g., fused or otherwise bonded) with another compound, such as a compound to increase the half-life of the polypeptide (for example, polyethylene glycol), and (iv) antigenic peptides in which additional amino acids are fused to the antigenic peptide. Preparing and using such analogs, etc., are within the scope of those skilled in the art in view of the present application. The antigenic peptides additionally include antigenic peptides that have at least about 90% identity to the given antigenic peptide, and preferably at least about 95% identity to the antigenic peptide. The antigenic peptides additionally include antigenic peptides that contain at least five, six, seven or more consecutive amino acids that are identical to the given antigenic peptide, as well as antigenic peptides that contain at least six, seven, eight or more consecutive amino acids that are identical to the given antigenic except for one or two conservative changes within this such stretch of amino acids. The antigenic peptides of the present invention can be produced by peptide synthesis.

[0216] Expression Profiles Based on Proteins:

[0217] An expression profile of a particular GPCR in one or more tissues can be made using antibodies or other binding partners produced using the antigenic peptides herein, then using traditional approaches such as Western blotting, immunohistochemistry analysis, protein array, ligand-binding studies, radioimmunoassay (RIA), and high performance liquid chromatography (HPLC), and immunohistochemistry analysis. H&E staining and other analyses can be used in combination with such immunologically-based analyses.

[0218] Screening for Activity:

[0219] The activity or functionality of an antigenic peptide can be measured using any of a variety of assays known in the art. Similarly, the specificity or affinity of an antibody or other binding partner made using the antigenic peptide can be measured using any of a variety of assays known in the art

[0220] The activity or functionality of a particular GPCR may be measured using any of a variety of functional assays in which activation of the receptor in question results in an observable change in the level of some second messenger system, including but not limited to adenylyl cyclase, calcium mobilization, arachidonic acid release, ion channel activity, inositol phospholipid hydrolysis, or guanylyl cyclase. Heterologous expression systems utilizing appropriate host cells to express the nucleic acid of the subject invention are used to obtain the desired second messenger coupling. Receptor activity may also be assayed in an oocyte expression system.

[0221] Protein Purification:

[0222] The antigenic peptides and proteins or polypeptides containing them can be purified by standard methods, including but not limited to salt or alcohol precipitation, preparative disc-gel electrophoresis, isoelectric focusing, high pressure liquid chromatography (HPLC), reversed-phase HPLC, gel filtration, cation and anion exchange, partition chromatography, and countercurrent distribution. Suitable purification methods will be readily apparent to those skilled in the art in view of the present application and are disclosed, e.g., in Guide to Protein Purification, Methods in Enzymology, Vol. 182, M. Deutscher, Ed., Academic Press, New York, N.Y. (1990). Purification steps can be followed as part of carrying out assays for ligand binding activity. Particularly where a particular GPCR is being isolated from a cellular or tissue source, it is preferable to include one or more inhibitors of proteolytic enzymes in the assay system, such as phenylmethylsulfonyl fluoride (PMSF).

[0223] E. Certain Assays, Antibodies, Probes, Therapeutics, and Other Systems and Aspects, of the Invention

[0224] 1. Systems and Methods for Screening for a Particular GPCR or Antigenic Peptide

[0225] Screening for Antigenic Peptides:

[0226] As noted elsewhere herein, the present invention provides antigenic peptides and antibodies that are specific for a particular GPCR. The invention also provides systems and methods for using or detecting such peptides, and antibodies against such peptides or corresponding GPCRs in a sample. The assays are based on the detection of the antigenic peptides, typically as they are displayed by the particular GPCR, or the detection of antibodies produced against the particular antigenic peptides and corresponding GPCRs.

[0227] Screening for/with Antigenic Peptides:

[0228] Many assays are characterized by the ability of antigenic peptides for a particular GPCR to be bound by antibodies against them, and the ability of antibodies produced against such antigenic peptides to bind to antigens or epitopes of the particular GPCR in a sample. Some exemplary assays are described below and elsewhere herein.

[0229] List of Assays:

[0230] A variety of assays can detect antibodies that bind specifically to the desired protein in or from a sample, or detect a desired protein bound to one or more antibodies in or from the sample. Exemplary assays are described in detail in Antibodies: A Laboratory Manual, Harlow and Lane (eds.), Cold Spring Harbor Laboratory Press (1988). Representative examples of such assays include: countercurrent immuno-electrophoresis (CIEP), radioimmunoassays, radioimmunoprecipitations, enzyme-linked immunosorbent assays (ELISA), dot blot assays, inhibition or competition assays, sandwich assays, immunostick (dip-stick) assays, simultaneous assays, immunochromatographic assays, immunofiltration assays, latex bead agglutination assays, immunofluorescent assays, biosensor assays, and low-light detection assays. See U.S. Pat. Nos. 4,376,110 and 4,486,530; WO 94/25597; WO/25598.

[0231] Enzyme-Linked Immunosorbent Assays (ELISA):

[0232] One assay for the detection of a particular GPCR is a sandwich assay such as an enzyme-linked immunosorbent assay (ELISA). In one preferred embodiment, the ELISA comprises the following steps: (1) coating the particular GPCR antigenic peptide onto a solid phase, (2) incubating a sample suspected of containing anti-particular GPCR antibodies with the antigenic peptide coated onto the solid phase under conditions that allow the formation of an antigen-antibody complex, (3) adding an anti-antibody (such as anti-IgG) conjugated with a label to be captured by the resulting antigen-antibody complex bound to the solid phase, and (4) measuring the captured label and determining therefrom whether the sample contains anti-particular GPCR antibodies.

[0233] Immunofluorescence Assay:

[0234] A fluorescent antibody test (FA-test) uses a fluorescently labeled antibody able to bind to one of the proteins of the invention. For detection, visual determinations are made by a technician using fluorescence microscopy, yielding a qualitative result. In one embodiment, this assay is used for the examination of tissue samples or histological sections.

[0235] Bead Agglutination Assays:

[0236] In latex bead agglutination assays, antibodies to one or more of the antigenic peptides of the present invention are conjugated to latex beads. The antibodies conjugated to the latex beads are then contacted with a sample under conditions permitting the antibodies to bind to desired proteins in the sample, if any. The results are then read visually, yielding a qualitative result. In some embodiments, as with certain other assays, this format can be used in the field for on-site testing.

[0237] Enzyme Immunoassays:

[0238] Enzyme immunoassays (EIA) include a number of different assays that can use the antibodies described in the present application. For example, a heterogeneous indirect EIA uses a solid phase coupled with an antibody of the invention and an affinity purified, anti-IgG immunoglobulin preparation. The solid phase can be a polystyrene microtiter plate. The antibodies and immunoglobulin preparation are then contacted with the sample under conditions permitting antibody binding, which conditions are well known in the art. The results of such an assay can be read visually or using a device such as a spectrophotometer, such as an ELISA plate reader, to yield a quantitative result. An alternative solid phase EIA format includes plastic-coated ferrous metal beads able to be moved during the procedures of the assay by means of a magnet. Yet another alternative is a low-light detection immunoassay format. In this highly sensitive format, the light emission produced by appropriately labeled bound antibodies are quantified automatically. Preferably, the reaction is performed using microtiter plates.

[0239] In an alternative embodiment, a radioactive tracer is substituted for the enzyme-mediated detection in an EIA to produce a radioimmunoassay (RIA).

[0240] Sandwich Assay:

[0241] In a capture-antibody sandwich enzyme assay, the desired protein is bound between an antibody attached to a solid phase, preferably a polystyrene microtiter plate, and a labeled antibody. The results can be measured, for example, using a spectrophotometer, such as an ELISA plate reader.

[0242] Sequential and Simultaneous Assays:

[0243] In a sequential assay format, reagents are allowed to incubate with the capture antibody in a stepwise fashion. The test sample is first incubated with the capture antibody. Following a wash step, incubation with the labeled antibody occurs. In a simultaneous assay, the two incubation periods described in the sequential assay are combined. This eliminates one incubation period plus a wash step.

[0244] Immunostick (Dip-Stick) Assays:

[0245] A dipstick/immunostick format is essentially an immunoassay using a polystyrene paddle or dipstick instead of a polystyrene microtiter plate as the solid phase. Reagents are the same and the format can either be simultaneous or sequential.

[0246] Immunochromatographic Assays:

[0247] In a chromatographic strip test format, a capture antibody and a labeled antibody are dried onto a chromatographic strip, which typically comprises nitrocellulose or high porosity nylon bonded to cellulose acetate. The capture antibody is usually spray dried as a line at one end of the strip. At this end, there is an absorbent material that is in contact with the strip. At the other end of the strip, the labeled antibody is deposited in a manner that prevents it from being absorbed onto the membrane. Usually, the label attached to the antibody is a latex bead or colloidal gold. The assay may be initiated by applying the sample immediately in front of the labeled antibody.

[0248] Immunofiltration Assays:

[0249] Immunofiltration/immunoconcentration formats combine a large solid-phase surface with directional flow of sample/reagents, which concentrates and accelerates the binding of antigen to antibody. In an exemplary format, the test sample is preincubated with a labeled antibody, and then applied to a solid phase such as fiber filters, nitrocellulose membranes, or the like. The solid phase can also be precoated with latex or glass beads coated with capture antibody. Detection of analyte is the same as that in a standard immunoassay. The flow of sample/reagents can be modulated by either vacuum or the wicking action of an underlying absorbent material.

[0250] Biosensor Assays:

[0251] A threshold biosensor assay is a sensitive, instrumented assay amenable to screening large numbers of samples at low cost. In one embodiment, such an assay comprises the use of light-addressable potentiometric sensors wherein the reaction involves the detection of a pH change due to binding of the desired protein by capture antibodies, bridging antibodies, and urease-conjugated antibodies. Upon binding, a pH change is effected that is measurable by translation into electrical potential (μvolts). The assay typically occurs in a very small reaction volume, and is very sensitive; the reported detection limit of the assay is 1,000 molecules of urease per minute.

[0252] 2. Antibodies

[0253] Antibodies Generated Against a Particular Antigenic Peptide and its Corresponding GPCR:

[0254] Highly specific, high affinity or antibodies against a particular GPCR or other polypeptide can be generated using the antigenic peptides herein and using antibody generation techniques as described herein or elsewhere. The antibodies produced using the antigenic peptides of the present invention, for example, have a specificity for the corresponding GPCR such that the antibodies can selectively detect the corresponding GPCR in a sample containing non-desired or contaminating proteins or polypeptides, such as a tissue or blood sample. Preferably, the antibodies have a high specificity such that no significant amounts of such proteins or polypeptides are detected, and further preferably have a specificity such that only insubstantial to essentially zero amounts of non-desirable proteins are detected. The antibodies produced using the antigenic peptides of the present invention, for example, typically have an affinity or avidity constant (Ka) of at least about 10⁷ liters/mole, typically a high affinity or avidity at least about 10⁹ liters/mole, preferably at least about 10¹⁰ liters/mole, and further preferably at least about 10¹¹ liters/mole.

[0255] The antibodies can be used to conduct immunohistochemistry and other analyses of a variety of tissue samples to determine expression of a particular GPCR in such tissues, for diagnostic assays, and for other desired purposes. The specification will now discuss a variety of antibody types, methods, uses, etc.

[0256] Antibodies Generally:

[0257] In some embodiments, the present invention provides antibodies and other binding partners created using the antigenic peptides herein and directed to a particular GPCR from which the antigenic peptides were derived. Compositions and uses for such antibodies are contemplated, including diagnostic, medicament, and therapeutic uses. Various diagnostic, medicament, and therapeutic uses for antibodies have been reviewed above and, for example, in Goldenberg et al., Semin. Cancer Biol., 1(3):217-225 (1990); Beck et al., Semin. Cancer Biol., 1(3):181-188 (1990); Niman, Immunol. Ser., 53:189-204 (1990); Endo, Nippon Igaku Hoshasen Gakkai Zasshi (Japan), 50(8):901-909 (1990); and, U.S. Pat. No. 6,214,984.

[0258] Recognized immunoglobulin genes include the kappa, lambda, alpha, gamma, delta, epsilon, and mu constant region genes, as well as myriad immunoglobulin variable region genes. Light chains are classified as either kappa or lambda. Heavy chains are classified as gamma, mu, alpha, delta, or epsilon, which in turn define the immunoglobulin classes, IgG, IgM, IgA, IgD, and IgE, respectively. An exemplary immunoglobulin (antibody) structural unit comprises a tetramer. Each tetramer is composed of two identical pairs of antigenic peptide chains, each pair having one “light” chain (about 25 kD) and one “heavy” chain (about 50-70 kD). The N-terminus of each chain defines a variable region of about 100 to 110 or more amino acids primarily responsible for antigen recognition. The terms variable light chain (V_{L}) and variable heavy chain (V_{H}) refer to these light and heavy chains respectively.

[0259] Anti-Idiotypic Antibodies:

[0260] The present invention encompasses anti-idiotypic antibodies, including polyclonal and monoclonal anti-idiotypic antibodies, that are produced using the antibodies described herein as antigens. These anti-idiotypic antibodies are useful because they may mimic the structures of the antigenic peptides set forth herein.

[0261] Techniques for producing antibodies, including antibody fragments, include the following.

[0262] a. Antibody Preparation

[0263] (i) Polyclonal Antibodies

[0264] Antibody Prep—Polyclonal:

[0265] Polyclonal antibodies are generally raised in animals by multiple subcutaneous (sc) or intraperitoneal (ip) injections of the relevant antigen and an adjuvant. It may be useful to conjugate the relevant antigen to a protein that is immunogenic in the species to be immunized, e.g., keyhole limpet hemocyanin, serum albumin, bovine thyroglobulin, or soybean trypsin inhibitor, using a bifunctional or derivatizing agent, for example, maleimidobenzoyl sulfosuccinimide ester (conjugation through cysteine residues), N-hydroxysuccinimide (through lysine residues), glutaraldehyde, succinic anhydride, SOCL₂, or R¹N═C═NR, where R and R¹ are different alkyl groups.

[0266] Antibody Prep—Adjuvants (All ABS):

[0267] Suitable adjuvants for the vaccination of animals for the production of polyclonal, monoclonal, and other antibodies include but are not limited to Adjuvant 65 (containing peanut oil, mannide monooleate, and aluminum monostearate); Freund's complete or incomplete adjuvant; mineral gels such as aluminum hydroxide, aluminum phosphate, and alum; surfactants such as hexadecylamine, octadecylamine, lysolecithin, dimethyldioctadecylammonium bromide, N,N-dioctadecyl-N′,N′-bis(2-hydroxymethyl) propanediamine, methoxyhexadecylglycerol, and pluronic polyols; polyanions such as pyran, dextran sulfate, poly IC, polyacrylic acid, and carbopol; peptides such as muramyl dipeptide, dimethylglycine, tuftsin, stress proteins, core-containing proteins from a positive stranded RNA virus, see U.S. Pat. No. 6,153,378; and, oil emulsions. The antigenic peptides could also be administered following incorporation into liposomes or other microcarriers.

[0268] Information concerning adjuvants and various aspects of immunoassays are disclosed, e.g., in the series by P. Tijssen, Practice and Theory of Enzyme Immunoassays, 3rd Edition (1987), Elsevier, New York. Other useful references covering methods for preparing polyclonal antisera include Microbiology, Hoeber Medical Division, Harper and Row (1969); Landsteiner, Specificity of Serological Reactions, Dover Publications, New York (1962); and, Williams, et al., Methods in Immunology and Immunochemistry, Vol. 1, Academic Press, New York (1967).

[0269] Animals can be immunized against the antigen, immunogenic conjugates, or derivatives by combining 1 mg or 1 μg of the peptide or conjugate (for rabbits or mice, respectively) with 3 volumes of Freund's complete adjuvant and injecting the solution intradermally at multiple sites. One month later the animals are boosted with ⅕ to 1/10 the original amount of peptide or conjugate in Freund's complete adjuvant by subcutaneous injection at multiple sites. Seven to 14 days later the animals are bled and the serum is assayed for antibody titer. Animals are boosted until the titer plateaus. Preferably, the animal is boosted with the conjugate of the same antigen, but conjugated to a different protein or through a different cross-linking reagent. Conjugates also can be made in recombinant cell culture as protein fusions. In addition, aggregating agents such as alum can be suitably used to enhance the immune response.

[0270] (ii) Monoclonal Antibodies

[0271] Antibody Prep—Monoclonal:

[0272] Monoclonal antibodies are obtained from a population of substantially homogeneous antibodies, e.g., the individual antibodies comprising the population are identical except for possible naturally occurring mutations that may be present in minor amounts. For example, monoclonal antibodies can be made using the hybridoma method first described by Kohler and Milstein, Nature, 256:495 (1975), or can be made by recombinant DNA methods, or otherwise as desired.

[0273] In the hybridoma method, a mouse, or other appropriate host animal, such as a hamster, is immunized as described herein to elicit lymphocytes that produce or are capable of producing antibodies that will bind specifically to the antigenic peptide used for immunization. Alternatively, lymphocytes may be immunized in vitro. Lymphocytes then are fused with myeloma cells using a suitable fusing agent, such as polyethylene glycol, to form a hybridoma cell, Goding, Monoclonal Antibodies: Principles and Practice, pp. 59-103, Academic Press (1986).

[0274] The hybridoma cells thus prepared are seeded and grown in a suitable culture medium that preferably contains one or more substances that inhibit the growth or survival of the unfused, parental myeloma cells. For example, if the parental myeloma cells lack the enzyme hypoxanthine guanine phosphoribosyl transferase (HGPRT or HPRT), the culture medium for the hybridomas typically will include hypoxanthine, aminopterin, and thymidine (HAT medium), which substances prevent the growth of HGPRT-deficient cells.

[0275] Preferred myeloma cells are those that fuse efficiently, support stable high-level production of antibody by the selected antibody-producing cells, and are sensitive to a medium such as HAT medium, for example murine myeloma lines, such as those derived from MOPC-21 and MPC-11 mouse tumors available from the Salk Institute Cell Distribution Center, San Diego, Calif. USA, and SP-2 cells available from the American Type Culture Collection, Rockville, Md. USA. Human myeloma and mouse-human heteromyeloma cell lines have also been described for the production of human monoclonal antibodies, Kozbor, J. Immunol., 133:3001 (1984); Brodeur et al., Monoclonal Antibody Production Techniques and Applications, pp. 51-63, Marcel Dekker, Inc., New York (1987).

[0276] Culture medium in which hybridoma cells are growing is assayed for production of monoclonal antibodies directed against the antigenic peptide. The binding specificity of monoclonal antibodies produced by hybridoma cells can be determined by immunoprecipitation or by an in vitro binding assay, such as radioimmunoassay (RIA) or enzyme-linked immunosorbent assay (ELISA). The binding affinity of the monoclonal antibody can, for example, be determined by the Scatchard analysis of Munson and Pollard, Anal. Biochem., 107:220 (1980). The antibodies produced using the antigenic peptides of the present invention, for example, typically have an affinity or avidity constant (Ka) of at least about 10⁷ liters/mole, typically a high affinity or avidity at least about 10⁹ liters/mole, preferably at least about 10¹⁰ liters/mole, and further preferably at least about 10¹¹ liters/mole.

[0277] After hybridoma cells are identified that produce antibodies of the desired specificity, affinity, or activity, the clones may be subcloned by limiting dilution procedures and grown by standard methods (Goding, supra). Suitable culture media for this purpose include, for example, D-MEM or RPMI-1640 medium. In addition, the hybridoma cells may be grown in vivo as ascites tumors in an animal.

[0278] The monoclonal antibodies secreted by the subclones are suitably separated from the culture medium, ascites fluid, or serum by conventional immunoglobulin purification procedures such as, for example, protein A-SEPHAROSE™, hydroxyapatite chromatography, gel electrophoresis, dialysis, or affinity chromatography.

[0279] DNA encoding the monoclonal antibodies can be readily isolated and sequenced using conventional procedures (e.g., by using oligonucleotide probes that are capable of binding specifically to genes encoding the heavy and light chains of murine antibodies). The hybridoma cells serve as a preferred source of such DNA. Once isolated, the DNA may be placed into expression vectors, which can then be transfected into host cells such as E. coli cells, simian COS cells, Chinese hamster ovary (CHO) cells, or myeloma cells that do not otherwise produce immunoglobulin protein, to obtain the synthesis of monoclonal antibodies in the recombinant host cells. Review articles on recombinant expression in bacteria of DNA encoding antibody include Skerra et al., Curr. Opinion in Immunol., 5:256-262 (1993), and Pluckthun, Immunol. Revs., 130:151-188 (1992).

[0280] Moabs—Combinatorial:

[0281] In a further embodiment, antibodies or antibody fragments can be isolated from antibody phage libraries generated using the techniques described in McCafferty et al., Nature, 348:552-554 (1990), using the proper antigen such as CD1 la, CD18, IgE, or HER-2 to select for a suitable antibody or antibody fragment. Clackson et al., Nature, 352:624-628 (1991) and Marks et al., J. Mol. Biol., 222:581-597 (1991) describe the isolation of murine and human antibodies, respectively, using phage libraries. Subsequent publications describe the production of high affinity (nM range) human antibodies by chain shuffling, Marks et al., Biotechnology, 10:779-783 (1992), as well as combinatorial infection and in vivo recombination as strategies for constructing very large phage libraries, Waterhouse et al., Nuc. Acids. Res., 21:2265-2266 (1993). Combinatorial antibodies are also discussed in Huse et al., Science 246:1275-1281 (1989), and Sastry et al., Proc. Natl. Acad. Sci. USA, 86:5728-5732 (1989), and Alting-Mees et al., Strategies in Molecular Biology 3:1-9 (1990). These references describe a system commercially available from Stratacyte, La Jolla, Calif. USA. Briefly, mRNA is isolated from a B cell population and utilized to create heavy and light chain immunoglobulin cDNA expression libraries in the λIMMUNOZAP(H) and λIMMUNOZAP(L) vectors. These vectors may be screened individually or co-expressed to form Fab fragments or antibodies, see Huse et al., supra; see also Sastry et al., supra. Positive plaques can subsequently be converted to a non-lytic plasmid, which allows for high-level expression of monoclonal antibody fragments from E. coli.

[0282] Humanized Moab:

[0283] Binding partners can also be constructed utilizing recombinant DNA techniques to incorporate the variable regions of a gene that encode a specifically binding antibody. The construction of these binding partners can be readily accomplished by one of ordinary skill in the art in view of the present application. See Larrick et al., Biotechnology, 7:934-938 (1989); Riechmann et al., Nature, 332:323-327 (1988); Roberts et al., Nature, 328:731-734 (1987); Verhoeyen et al., Science 239:1534-1536 (1988); Chaudhary et al., Nature, 339:394-397 (1989); see also U.S. Pat. No. 5,132,405 entitled “Biosynthetic Antibody Binding Sites”.) For example, the DNA can be modified by substituting the coding sequence for human heavy- and light-chain constant domains in place of homologous murine sequences, U.S. Pat. No. 4,816,567; Morrison, et al., Proc. Nat. Acad. Sci., 81:6851 (1984), or by covalently joining to the immunoglobulin coding sequence all or part of the coding sequence for a non-immunoglobulin polypeptide. In another example, DNA segments encoding the desired antigen-binding domains specific for the protein or peptide of interest are amplified from appropriate hybridomas and inserted directly into the genome of a cell that produces human antibodies. See Verhoeyen et al., supra; see also Reichmann et al., supra. Some of these techniques transfer the antigen-binding site of a specifically binding mouse or rat monoclonal antibody or the like to a human antibody. Such antibodies can be preferable for therapeutic use in humans because they are typically not as antigenic as rat or mouse antibodies.

[0284] In an alternative embodiment, genes that encode the variable region from a hybridoma producing a monoclonal antibody of interest can be amplified using oligonucleotide primers for the variable region. These primers may be synthesized by one of ordinary skill in the art, or may be purchased from commercially available sources. For instance, primers for mouse and human variable regions including, among others, primers for V_{H}a, V_{H}b, V_{H}c, V_{H}d, C_{H}1, V_{L}, and C_{L} regions are available from Stratacyte (La Jolla, Calif.). These primers may be utilized to amplify heavy- or light-chain variable regions, which may then be inserted into vectors such as IMMUNOZAP™(H) or IMMUNOZAP™(L) (Stratacyte), respectively. These vectors may then be introduced into E. coli for expression. Utilizing these techniques, large amounts of a single-chain protein containing a fusion of the VH and VL domains may be produced, see Bird et al., Science 242:423-426 (1988).

[0285] Antibody Substitutions—Non-Immunoglobulin Polypeptides (All ABS):

[0286] Non-immunoglobulin polypeptides can be substituted in monoclonal and other antibodies described herein for the constant domains of an antibody, or they can be substituted for the variable domains of one antigen-combining site of an antibody to create a chimeric bivalent antibody comprising one antigen-combining site having specificity for an antigen and another antigen-combining site having specificity for a different antigen.

[0287] CHIMERICS:

[0288] Chimeric or hybrid antibodies can also be prepared in vitro using known methods in synthetic protein chemistry, including those involving crosslinking agents, in view of the present application. For example, immunotoxins may be constructed using a disulfide-exchange reaction or by forming a thioether bond. Examples of suitable reagents for this purpose include iminothiolate and methyl-4-mercaptobutyrimidate.

[0289] Antibody Labeling (All ABS):

[0290] For diagnostic applications or otherwise as desired, and for monoclonal and other antibodies described herein, the antibodies and other binding partners typically will be labeled with a detectable moiety. The detectable moiety can be any moiety that is capable of producing, either directly or indirectly, a detectable signal. For example, the detectable moiety may be a radioisotope, such as ³H, ¹⁴C, ³²P, ³⁵S, or ¹²⁵I; a fluorescent or chemiluminescent compound, such as fluorescein isothiocyanate, rhodamine, or luciferin; or an enzyme, such as alkaline phosphatase, beta-galactosidase, or horseradish peroxidase. Any method known in the art for conjugating the antibody or binding partner to the detectable moiety may be employed, including those methods described by Hunter et al., Nature, 144:945 (1962); David et al., Biochemistry, 13:1014 (1974); Pain et al., J. Immunol. Meth., 40:219 (1981); and Nygren, J. Histochem. Cytochem., 30:407 (1982).

[0291] (iii) Humanized And Human Antibodies

[0292] Humanized AB Generally:

[0293] Methods for humanizing non-human antibodies are well known in the art and have been discussed in part above. Generally, a humanized antibody has one or more amino acid residues introduced into it from a source which is non-human. These non-human amino acid residues are often referred to as “import” residues, which are typically taken from an “import” variable domain. Humanization can be performed essentially following the method of Winter and co-workers, Jones et al., Nature, 321:522-525 (1986); Riechmann et al., Nature, 332:323-327 (1988); Verhoeyen et al., Science, 239:1534-1536 (1988), by substituting rodent CDRs or CDR sequences for the corresponding sequences of a human antibody. Accordingly, such humanized antibodies are chimeric antibodies, U.S. Pat. No. 4,816,567, wherein substantially less than an intact human variable domain has been substituted by the corresponding sequence from a non-human species. In practice, humanized antibodies are typically human antibodies in which some CDR residues and possibly some FR residues are substituted by residues from analogous sites in rodent antibodies.

[0294] The choice of human variable domains, both light and heavy, to be used in making humanized antibodies is very important to reduce antigenicity. According to the so-called “best-fit” method, the sequence of the variable domain of a rodent antibody is screened against the entire library of known human variable-domain sequences. The human sequence that is closest to that of the rodent is then accepted as the human framework (FR) for the humanized antibody. Sims et al., J. Immunol., 151:2296 (1993); Chothia and Lesk, J. Mol. Biol., 196:901 (1987). Another method uses a particular framework derived from the consensus sequence of all human antibodies of a particular subgroup of light or heavy chains. The same framework may be used for several different humanized antibodies. Carter et al., Proc. Natl. Acad. Sci. USA, 89:4285 (1992); Presta et al., J. Immunol., 151:2623 (1993).

[0295] It is typically desirable that antibodies be humanized with retention of high affinity for the antigen and other favorable biological properties. To achieve this goal, according to one method, humanized antibodies are prepared by a process of analysis of the parental sequences and various conceptual humanized products using three-dimensional models of the parental and humanized sequences. Three-dimensional immunoglobulin models are commonly available and are familiar to those skilled in the art. Computer programs are available that illustrate and display probable three-dimensional conformational structures of selected candidate immunoglobulin sequences. Inspection of these displays permits analysis of the likely role of the residues in the functioning of the candidate immunoglobulin sequence, e.g., the analysis of residues that influence the ability of the candidate immunoglobulin to bind antigen. In this way, FR residues can be selected and combined from the consensus and import sequences so that the desired antibody characteristic, such as increased affinity for the target antigen(s), is achieved. In general, CDR residues are directly and most substantially involved in influencing antigen binding.

[0296] It is also possible to produce transgenic animals (e.g., mice) that are capable, upon immunization, of producing a full repertoire of human antibodies in the absence of endogenous immunoglobulin production. For example, it has been described that the homozygous deletion of the antibody heavy-chain joining region (JH) gene in chimeric and germ-line mutant mice results in complete inhibition of endogenous antibody production. Transfer of the human germ-line immunoglobulin gene array in such germ-line mutant mice will result in the production of human antibodies upon antigen challenge. See, e.g., Jakobovits et al., Proc. Natl. Acad. Sci. USA. 90:2551-255 (1993); Jakobovits et al., Nature, 362:255-258 (1993); Bruggemann et al., Year Immuno., 7:33 (1993). Human antibodies can also be produced in phage-display libraries, Hoogenboom and Winter, J. Mol. Biol., 227:381 (1991); Marks et al., J. Mol. Biol., 222:581 (1991).

[0297] (iv) Antibody Fragments

[0298] Antibody Fragments:

[0299] Various techniques have been developed for the production of antibody fragments. Such fragments can be derived via proteolytic digestion of intact antibodies, see, e.g., Morimoto et al., J. Biochem. Biophys. Meth. 24:107-117 (1992) and Brennan et al., Science, 229:81 (1985). Fragments can also be produced directly by recombinant host cells. For example, antibody fragments can be isolated from antibody phage libraries discussed above. Fab′-SH fragments can be directly recovered from E. coli and chemically coupled to form F(ab′)₂ fragments, Carter et al., Biotechnology 10:163-167 (1992). F(ab′)₂ fragments can be isolated directly from recombinant host cell culture. Other techniques for the production of antibody fragments will be apparent to the skilled practitioner.

[0300] (v) Bispecific Antibodies

[0301] Bispecific Antibodies Generally:

[0302] Bispecific antibodies (BsAbs) are antibodies that have binding specificities for at least two different antigens. Bispecific antibodies can be derived from full-length antibodies or from antibody fragments, e.g., F(ab′)₂ bispecific antibodies.

[0303] Methods for making bispecific antibodies are known in the art. Traditional production of full-length bispecific antibodies is based on the coexpression of two immunoglobulin heavy chain-light chain pairs, where the two chains have different specificities, Millstein and Cuello, Nature, 305:537-539 (1983). Because of the random assortment of immunoglobulin heavy and light chains, these hybridomas (quadromas) produce a mixture of potentially 10 different antibody molecules, of which only one has the correct bispecific structure. Purification of the correct molecule, which is usually accomplished by affinity chromatography steps, is rather cumbersome, and the product yields are low. Similar procedures are disclosed in WO 93/08829, and in Traunecker et al., E.M.B.O. J., 10:3655-3659 (1991).

[0304] According to another approach, antibody variable domains containing the desired binding specificities (antibody-antigen combining sites) are fused to immunoglobulin constant domain sequences. The fusion is preferably with an immunoglobulin heavy chain constant domain, comprising at least part of the hinge, C_{H} 2, and C_{H} 3 regions. It is preferred to have the first heavy-chain constant region (C_{H} 1) containing the site necessary for light chain binding, present in at least one of the fusions. DNAs encoding the immunoglobulin heavy chain fusions and, if desired, the immunoglobulin light chain, are inserted into separate expression vectors, and are co-transfected into a suitable host organism. This provides for great flexibility in adjusting the mutual proportions of the three polypeptide fragments in embodiments when unequal ratios of the three polypeptide chains used in the construction provide the improved yields. It is, however, possible to insert the coding sequences for two or all three polypeptide chains in one expression vector when the expression of at least two polypeptide chains in equal ratios results in high yields or when the ratios are of no particular significance.

[0305] Antibodies—Hybrid Immunoglobulin Heavy Chain:

[0306] In one embodiment of this approach, the bispecific antibodies are composed of a hybrid immunoglobulin heavy chain with a first binding specificity in one arm, and a hybrid immunoglobulin heavy chain-light chain pair (providing a second binding specificity) in the other arm. This asymmetric structure may facilitate the separation of the desired bispecific compound from unwanted immunoglobulin chain combinations, as the presence of an immunoglobulin light chain in only one half of the bispecific molecule provides for a facile method of separation. This approach is discussed in WO 94/04690. For further details of generating bispecific antibodies see, for example, Suresh et al., Meth. Enzymol., 121:210 (1986).

[0307] ANTIBODIES—CROSS-LINKED OR “HETEROCONJUGATE”:

[0308] Bispecific antibodies include cross-linked or “heteroconjugate” antibodies. For example, one of the antibodies in the heteroconjugate can be coupled to avidin, the other to biotin. Such antibodies have, for example, been proposed to target immune system cells to unwanted cells, U.S. Pat. No. 4,676,980), and for treatment of HIV infection, WO 91/00360, WO 92/200373, and EP 03089). Heteroconjugate antibodies may be made using any convenient cross-linking methods. Suitable cross-linking agents are well known in the art, and are disclosed in U.S. Pat. No. 4,676,980, along with a number of cross-linking techniques.

[0309] ANTIBODIES—DIABODIES:

[0310] The “diabody” technology described by Hollinger et al., Proc. Natl. Acad. Sci. USA, 90:6444-6448 (1993) has provided an alternative mechanism for making BsAb fragments. The fragments comprise a heavy-chain variable domain (V_{H}) connected to a light-chain variable domain (V_{L}) by a linker that is too short to allow pairing between the two domains on the same chain. Accordingly, the V_{H} and V_{L} domains of one fragment are forced to pair with the complementary V_{L} and V_{H} domains of another fragment, thereby forming two antigen-binding sites.

[0311] Another strategy for making BsAb fragments by the use of single-chain Fv (sFv) dimers has also been reported. See Gruber et al., J. Immunol., 152:5368 (1994). These researchers designed an antibody comprising the V_{H} and V_{L} domains of a first antibody joined by a 25-amino-acid-residue linker to the V_{H} and V_{L} domains of a second antibody. The refolded molecule bound to fluorescein and the T-cell receptor and redirected the lysis of human tumor cells that had fluorescein covalently linked to their surface.

[0312] Antibodies—Other:

[0313] Techniques for generating bispecific antibodies from antibody fragments have also been described in the literature. For example, bispecific antibodies can be prepared using chemical linkage. Brennan et al., Science, 229:81 (1985) describe a procedure wherein intact antibodies are proteolytically cleaved to generate F(ab′)₂ fragments. These fragments are reduced in the presence of the dithiol complexing agent sodium arsenite to stabilize vicinal dithiols and prevent intermolecular disulfide formation. The Fab′ fragments generated are then converted to thionitrobenzoate (TNB) derivatives. One of the Fab′-TNB derivatives is then reconverted to the Fab′-thiol by reduction with mercaptoethylamine and is mixed with an equimolar amount of the other Fab′-TNB derivative to form the BsAb. The BsAbs produced can be used as agents for the selective immobilization of enzymes.

[0314] Fab′-SH fragments can be directly recovered from E. coli, which can be chemically coupled to form bispecific antibodies. Shalaby et al., J. Exp. Med., 175:217-225 (1992) describe the production of a fully humanized BsAb F(ab′)₂ molecule. Each Fab′ fragment was separately secreted from E. coli and subjected to directed chemical coupling in vitro to form the BsAb. The BsAb thus formed was able to bind to cells overexpressing the HER2 receptor and normal human T cells, as well as trigger the lytic activity of human cytotoxic lymphocytes against human breast tumor targets. See also Rodriguez et al., Int. J. Cancers (Suppl.) 7:45-50 (1992).

[0315] Various techniques for making and isolating BsAb fragments directly from recombinant cell culture have also been described. For example, bispecific F(ab′)₂ heterodimers have been produced using leucine zippers. Kostelny et al., J. Immunol., 148(5):1547-1553 (1992). The leucine zipper peptides from the Fos and Jun proteins are linked to the Fab′ portions of two different antibodies by gene fusion. The antibody homodimers are reduced at the hinge region to form monomers and then re-oxidized to form the antibody heterodimers. b. Antibody Purification 12211 ANTIBODY PURIFICATION GENERALLY:

[0316] When using recombinant techniques, the antibody can be produced intracellularly, in the periplasmic space, or directly secreted into the medium. If the antibody is produced intracellularly, as a first step, the particulate debris, either host cells or lysed fragments, is removed, for example, by centrifugation or ultrafiltration. Carter et al., Bio/Technology 10:163-167 (1992), describe a procedure for isolating antibodies which are secreted to the periplasmic space of E. coli. Briefly, cell paste is thawed in the presence of sodium acetate (pH 3.5), EDTA, and phenylmethylsulfonylfluoride (PMSF) over about 30 min. Cell debris can be removed by centrifugation. Where the antibody is secreted into the medium, supernatants from such expression systems are generally first concentrated using a commercially available protein concentration filter, for example, an Amicon or Millipore Pellicon ultrafiltration unit. A protease inhibitor such as PMSF may be included in any of the foregoing steps to inhibit proteolysis and antibiotics may be included to prevent the growth of adventitious contaminants.

[0317] Before LPHIC:

[0318] The antibody composition prepared from the cells is preferably subjected to at least one purification step prior to LPHIC. Examples of suitable purification steps include hydroxyapatite chromatography, gel electrophoresis, dialysis, and affinity chromatography. The suitability of protein A as an affinity ligand depends on the species and isotype of any immunoglobulin Fc domain that is present in the antibody. Protein A can be used to purify antibodies that are based on human γ1, γ2, or γ4 heavy chains, Lindmark et al., J. Immunol. Meth. 62:1-13 (1983). Protein G has been recommended for mouse isotypes and for human γ3, Guss et al., E.M.B.O. J., 5:1567-1575 (1986). The matrix to which the affinity ligand is attached is often agarose, but other matrices are available. Mechanically stable matrices such as controlled pore glass or poly(styrenedivinyl)benzene allow for faster flow rates and shorter processing times than can be achieved with agarose. Where the antibody comprises a C_{H} 3 domain, the Bakerbond ABX™ resin (J. T. Baker, Phillipsburg, N.J.) is useful for purification. Other techniques for protein purification such as fractionation on an ion-exchange column, ethanol precipitation, Reverse Phase HPLC, chromatography on silica, chromatography on heparin SEPHAROSE™, chromatography on an anion or cation exchange resin (such as a polyaspartic acid column), chromatofocusing, SDS-PAGE, and ammonium sulfate precipitation are also available depending on the antibody to be recovered.

[0319] LPHIC:

[0320] Following any preliminary purification step(s), the mixture comprising the antibody of interest and contaminant(s) can be subjected to LPHIC. See U.S. Pat. No. 6,214,984. Often, the antibody composition to be purified will be present in a buffer from the previous purification step. However, it may be necessary to add a buffer to the antibody composition prior to the LPHIC step. Many buffers are available and can be selected by routine experimentation. The pH of the mixture comprising the antibody to be purified and at least one contaminant in a loading buffer is adjusted to a pH of about 2.5-4.5 using either an acid or base, depending on the starting pH. The loading buffer can have a low salt concentration (e.g., less than about 0.25 M salt).

[0321] The mixture is loaded on the HIC column. HIC columns normally comprise a base matrix (e.g., cross-linked agarose or synthetic copolymer material) to which hydrophobic ligands (e.g., alkyl or aryl groups) are coupled. One example of an HIC column comprises an agarose resin substituted with phenyl groups (e.g., a Phenyl SEPHAROSE™ column). Many HIC columns are available commercially. Examples include, but are not limited to, Phenyl SEPHAROSE 6 FAST FLOW™ column with low or high substitution (Pharmacia LKB Biotechnology, AB, Sweden); Phenyl SEPHAROSE™ High Performance column (Pharmacia LKB Biotechnology, AB, Sweden); Octyl SEPHAROSE™ High Performance column (Pharmacia LKB Biotechnology, AB, Sweden); FRACTOGEL™ TM EMD Propyl or FRACTOGEL™ EMD Phenyl columns (E. Merck, Germany); MACRO-PREP™ Methyl or MACRO-PREP™ t-Butyl Supports (Bio-Rad, California); WP HI-Propyl (C₃)™ column (J. T. Baker, New Jersey); and TOYOPEARL™ ether, phenyl, or butyl columns (TosoHaas, PA).

[0322] The antibody is typically eluted from the column using an elution buffer that is the same as the loading buffer. The elution buffer can be selected using routine experimentation in view of the present application. The pH of the elution buffer may be between about 2.5-4.5 and have a low salt concentration (e.g., less than about 0.25 M salt). It may not be necessary to use a salt gradient to elute the antibody of interest; the desired product may be recovered in the flow-through fraction that does not bind significantly to the column.

[0323] The LPHIC step provides a way to remove a correctly folded and disulfide bonded antibody from unwanted contaminants (e.g., incorrectly associated light and heavy fragments). The method can provide an approach to substantially remove an impurity characterized as a correctly folded antibody fragment whose light and heavy chains fail to associate through disulfide bonding. Antibody compositions prepared using LPHIC can be up to about 95% pure or more. Purities of more than about 98% have been reported. U.S. Pat. No. 6,214,984.

[0324] Post LPHIC:

[0325] Antibody compositions prepared by LPHIC can be further purified as desired using techniques which are well known in the art. Diagnostic or therapeutic formulations of the purified protein can be made by providing the antibody composition in a physiologically acceptable carrier, examples of which are provided below. To remove contaminants (e.g., unfolded antibody and incorrectly associated light and heavy fragments) from the HIC column so that it can be re-used, a composition including urea (e.g., 6.0 M urea, 1% MES buffer pH 6.0, 4 mM ammonium sulfate) can be flowed through the column.

[0326] c. Some Uses for Antibodies Described Herein

[0327] (i) Generally

[0328] Generally:

[0329] The present invention comprises any suitable use for the antibodies and other binding partners discussed herein. The following provides some of the desired uses, including diagnostic and therapeutic uses. Various diagnostic and therapeutic uses for antibodies have been reviewed in Goldenberg et al., Semin. Cancer Biol., 1(3):217-225 (1990); Beck et al., Semin. Cancer Biol., 1(3):181-188 (1990); Niman, Immunol. Ser. 53:189-204 (1990); and, Endo, Nippon Igaku Hoshasen Gakkai Zasshi (Japan) 50(8):901-909 (1990), for example.

[0330] Assays:

[0331] The antibodies can be used in immunoassays, such as enzyme immunoassays. BsAbs can be useful for this type of assay; one arm of the BsAb can be designed to bind to a specific epitope on the enzyme so that binding does not cause enzyme inhibition, the other arm of the antibody can be designed to bind to an immobilizing matrix ensuring a high enzyme density at the desired site. Examples of such diagnostic BsAbs include those having specificity for IgG as well as ferritin, and those having binding specificities for horseradish peroxidase (HRP) as well as a hormone, for example. Monoclonal and polyclonal antibodies are also exemplary antibodies for immunoassays.

[0332] The antibodies can be designed for use in two-site immunoassays. For example, two antibodies are produced binding to two separate epitopes on the analyte protein; one antibody binds the complex to an insoluble matrix, the other binds an indicator enzyme.

[0333] Diagnostic Uses:

[0334] Antibodies can also be used for immunodiagnosis, in vitro or in vivo or otherwise, of various diseases or conditions based on the presence or absence of a particular GPCR. Such diseases and conditions include, e.g., immune-related diseases, cell growth-related diseases, cell regeneration-related diseases, immunological-related cell proliferative diseases, and autoimmune diseases. Examples of specific diseases include AIDS, allergies, Alzheimer's disease, amyotrophic lateral sclerosis, atherosclerosis, bacterial, fungal, protozoan and viral infections, benign prostatic hypertrophy, bone diseases (e.g., osteoarthritis, osteoporosis), carcinoma (e.g., basal cell carcinoma, breast carcinoma, embryonal carcinoma, ovarian carcinoma, renal cell carcinoma, lung adenocarcinoma, lung small cell carcinoma, pancreatic carcinoma, prostate carcinoma, transitional carcinoma of the bladder, squamous cell carcinoma, thyroid carcinoma), cardiomyopathy, chronic and acute inflammation, circadian rhythm disorders, COPD, Crohn's disease, diabetes, Duchenne muscular dystrophy, embryonal carcinoma, endotoxic shock, environmental stress (e.g., by heat, UV or chemicals), gastrointestinal disorders, glioblastoma multiform, graft vs. host disease, Hodgkin's disease, inflammatory bowel disease, ischemia, stroke, lymphoma, macular degeneration, malignant cytokine production, malignant fibrous histiocytoma, melanoma, meningioma, mesothelioma, multiple sclerosis, nasal congestion, pain, Parkinson's disease, prostate carcinoma, psoriasis, rhabdomyosarcoma, psychotic or neurological disorders (e.g., anxiety, depression, schizophrenia, dementia, mental retardation, memory loss, epilepsy, locomotor problems, respiratory disorders, asthma, eating/body weight disorders including obesity, bulimia, diabetes, anorexia, nausea, hypertension, hypotension), renal disorders, reperfusion injury, rheumatoid arthritis, sarcoma (e.g., chondrosarcoma, Ewing's sarcoma, osteosarcoma), septicemia, seminoma, sexual/reproductive disorders, tonsil, transitional carcinoma of the bladder, transplant rejection, trauma, tuberculosis, ulcers, ulcerative colitis, urinary retention, vascular and cardiovascular disorders, or any other disease or disorder in which G protein-coupled receptors are involved, as well as learning and/or memory disorders, diabetes, pain perception disorders, anorexia, obesity, hormonal release problems, or any other disease or disorder in which a specific GPCR is involved.

[0335] To facilitate this diagnostic use, an antibody that binds a particular GPCR, when such is differentially expressed in tumors or other target diseases, can be conjugated with a detectable marker (e.g., a chelator that binds a radionuclide). Examples of tumor-associated antigens being used in a similar fashion include an antibody having specificity for the tumor-associated antigen CEA used for imaging colorectal and thyroid carcinomas and the anti-p185^{HER2} antibody used for detecting cancers characterized by amplification of the HER2 protooncogene. Other uses for the antibodies of the present invention will be apparent to the skilled practitioner in view of the present application.

[0336] (ii) Assays

[0337] Assays:

[0338] For certain applications such as some diagnostic and other assay applications, the antibody typically can be labeled directly or indirectly with a detectable moiety. The detectable moiety can be any moiety that is capable of producing, either directly or indirectly, a detectable signal. For example, the detectable moiety may be a radioisotope, such as ³H, ¹⁴C, ³²p, 35%, or 125I; a fluorescent or chemiluminescent compound, such as fluorescein isothiocyanate, rhodamine, or luciferin; or an enzyme, such as alkaline phosphatase, beta-galactosidase, or HRP.

[0339] Any method known in the art for separately conjugating the antibody to the detectable moiety may be employed, including those methods described by Hunter et al., Nature, 144:945 (1962); David et al., Biochemistry, 13:1014 (1974); Pain et al., J. Immunol. Meth. 40:219 (1981); and, Nygren, J. Histochem. and Cytochem. 30:407 (1982).

[0340] The antibodies of the present invention may be employed in any desired assay method, such as competitive binding assays, direct, and indirect sandwich assays, and immunoprecipitation assays. Zola, Monoclonal Antibodies: A Manual of Techniques, pp. 147-158 (CRC Press, Inc. (1987).

[0341] Competitive Binding Assays:

[0342] Competitive binding assays rely on the ability of a labeled standard to compete with the test sample analyte for binding with a limited amount of antibody. The amount of analyte in the test sample is inversely proportional to the amount of standard that becomes bound to the antibody. To facilitate determining the amount of standard that becomes bound, the antibody generally is insolubilized before or after the competition, so that the standard, and analyte that are bound to the antibody may conveniently be separated from the standard, and analyte which remain unbound.

[0343] BsAbs are particularly useful for sandwich assays which involve the use of two molecules, each capable of binding to a different immunogenic portion, or epitope, of the sample to be detected. In a sandwich assay, the test sample analyte is bound by a first arm of the antibody which is immobilized on a solid support, and thereafter a second arm of the antibody binds to the analyte, thus forming an insoluble three part complex. See, e.g., U.S. Pat. No. 4,376,110. The second arm of the antibody may itself be labeled with a detectable moiety (direct sandwich assays) or may be measured using an anti-immunoglobulin antibody that is labeled with a detectable moiety (indirect sandwich assay). For example, one type of sandwich assay is an ELISA assay, in which case the detectable moiety is an enzyme. Assays are discussed further elsewhere herein in relation to binding partners such as antibodies, and antigenic peptides for particular GPCRs, including assays searching for or using such antigenic peptides, and would be apparent to those skilled in the art in view of the present application.

[0344] (iii) Affinity Purification

[0345] Affinity Purification:

[0346] The antibodies also are useful for the affinity purification of an antigen of interest such as a particular GPCR from sources such as recombinant cell culture or natural sources.

[0347] (iv) Therapeutics

[0348] Therapeutic Uses:

[0349] Therapeutic compositions, and uses, etc., for the antibodies described herein will now be discussed. As with other parts of this application, this section does not contain the entire discussion of therapeutic uses or compositions, etc., for antibodies; other sections discuss both antibodies, and therapeutics, and the discussion in this section applies to certain other aspects discussed herein. Turning to antibodies and therapeutics, the antibodies can be used, for example, for redirected cytotoxicity (e.g., to kill tumor cells), as a vaccine adjuvant, for delivering thrombolytic agents to clots, for delivering immunotoxins to tumor cells, for converting enzyme activated prodrugs at a target site (e.g., a tumor), for treating infectious diseases or targeting immune complexes to cell surface receptors.

[0350] Therapeutic Formulations:

[0351] Therapeutic formulations of the antibody can be prepared for storage by mixing the antibody having the desired degree of purity with optional physiologically acceptable carriers, excipients, or stabilizers (Remington's Pharmaceutical Sciences, 16th edition, Osol, A., Ed. (1980), for example in the form of lyophilized cake or aqueous solutions. Acceptable carriers, excipients, or stabilizers are nontoxic to recipients at the dosages, and concentrations employed, and include buffers such as phosphate, citrate, and other organic acids; antioxidants including ascorbic acid; low molecular weight (less than about 10 residues) polypeptides; proteins, such as serum albumin, gelatin, or immunoglobulins; hydrophilic polymers such as polyvinylpyrrolidone; amino acids such as glycine, glutamine, asparagine, arginine, or lysine; monosaccharides, disaccharides, and other carbohydrates including glucose, mannose, or dextrins; chelating agents such as EDTA; sugar alcohols such as mannitol or sorbitol; salt-forming counterions such as sodium; or nonionic surfactants such as Tween, Pluronics, or polyethylene glycol (PEG).

[0352] The antibodies also may be entrapped in microcapsules prepared, for example, by coacervation techniques or by interfacial polymerization (for example, hydroxymethylcellulose or gelatin-microcapsules, and poly-[methylmethacrylate] microcapsules, respectively), in colloidal drug delivery systems (for example, liposomes, albumin microspheres, microemulsions, nano-particles, and nanocapsules), or in macroemulsions. Such techniques are disclosed in Remington's Pharmaceutical Sciences, supra.

[0353] Therapeutic Formulations—Sterile:

[0354] An antibody to be used for in vivo human administration should be sterile. This can be accomplished by filtration through sterile filtration membranes, for example prior to or following lyophilization and reconstitution. The antibody ordinarily will be stored in lyophilized form or in solution. Therapeutic antibody compositions generally are placed into a container having a sterile access port, for example, an intravenous solution bag or vial having a stopper pierceable by a hypodermic injection needle.

[0355] Therapeutic Administrations:

[0356] The route of antibody administration is in accord with known methods, e.g., injection or infusion by intravenous, intraperitoneal, intracerebral, intramuscular, intraocular, intraarterial, or intralesional routes, or by sustained release systems as noted below.

[0357] The antibody can be administered, for example, continuously by infusion or by bolus injection. Suitable examples of sustained-release preparations include semipermeable matrices of solid hydrophobic polymers containing the protein, which matrices are in the form of shaped articles, e.g., films, or microcapsules. Examples of sustained-release matrices include polyesters, hydrogels (e.g., poly(2-hydroxyethyl-methacrylate) as described by Langer et al., J. Biomed. Mater. Res., 15:167-277 (1981), and Langer, Chem. Tech., 12:98-105 (1982), or poly(vinylalcohol)), polylactides, U.S. Pat. No. 3,773,919; EP 58,481, copolymers of L-glutamic acid and gamma ethyl-L-glutamate, Sidman et al., Biopolymers, 22:547-556 (1983), non-degradable ethylene-vinyl acetate, Langer et al., supra, degradable lactic acid-glycolic acid copolymers such as the LUPRON DEPOT™ (injectable microspheres composed of lactic acid-glycolic acid copolymer and leuprolide acetate), and poly-D-(−)-3-hydroxybutyric acid, EP 133,988.

[0358] Therapeutic Administrations—Sustained Release-Polymers:

[0359] While polymers such as ethylene-vinyl acetate and lactic acid-glycolic acid sustain release of molecules for over 100 days, certain hydrogels release proteins for shorter time periods. When encapsulated antibodies remain in the body for a long time, they may denature or aggregate as a result of exposure to moisture at 37° C., resulting in a loss of biological activity and possible changes in immunogenicity. Rational strategies can be devised for antibody stabilization depending on the mechanism involved. For example, if the aggregation mechanism is discovered to be intermolecular S—S bond formation through thio-disulfide interchange, stabilization may be achieved by modifying sulfhydryl residues, lyophilizing from acidic solutions, controlling moisture content, using appropriate additives, and developing specific polymer matrix compositions.

[0360] Therapeutic Administrations—Sustained Release-Liposomes:

[0361] Sustained-release antibody compositions also include liposomally entrapped antibody. Liposomes containing the antibody can be prepared by methods such as those in DE 3,218,121; Epstein et al., Proc. Natl. Acad. Sci. USA, 82:3688-3692 (1985); Hwang et al., Proc. Natl. Acad. Sci. USA, 77:4030-4034 (1980); EP 52,322; EP 36,676; EP 88,046; EP 143,949; EP 142,641; Japanese patent application 83-118008; U.S. Pat. Nos. 4,485,045 and 4,544,545; and EP 102,324. Ordinarily the liposomes are of the small (about 200-800 Angstroms) unilamellar type in which the lipid content is greater than about 30 mol. % cholesterol, the selected proportion being adjusted for the optimal antibody therapy.

[0362] Therapeutically Effective Amount:

[0363] An effective amount of antibody to be employed therapeutically will depend, for example, upon the therapeutic objectives, the route of administration, and the condition of the patient. Accordingly, it will be necessary for the therapist to titer the dosage and modify the route of administration as required to obtain the optimal therapeutic effect. A typical daily dosage might range from about 1 μg/kg to up to 10 mg/kg or more, depending on the factors mentioned above. Typically, the clinician will administer antibody until a dosage is reached that achieves the desired effect. The progress of this therapy is easily monitored by conventional assays.

[0364] 5. Drug Design Based on the Antigens Herein or Antibodies Thereto

[0365] Disease/Conditions List:

[0366] The peptides and antibodies of the present invention can serve as valuable tools for designing drugs for treating various pathophysiological conditions such as immune-related diseases, cell growth-related diseases, cell regeneration-related diseases, immunological-related cell proliferative diseases, and autoimmune diseases. Examples of specific diseases include AIDS, allergies, Alzheimer's disease, amyotrophic lateral sclerosis, atherosclerosis, bacterial, fungal, protozoan and viral infections, benign prostatic hypertrophy, bone diseases (e.g., osteoarthritis, osteoporosis), carcinoma (e.g., basal cell carcinoma, breast carcinoma, embryonal carcinoma, ovarian carcinoma, renal cell carcinoma, lung adenocarcinoma, lung small cell carcinoma, pancreatic carcinoma, prostate carcinoma, transitional carcinoma of the bladder, squamous cell carcinoma, thyroid carcinoma), cardiomyopathy, chronic and acute inflammation, circadian rhythm disorders, COPD, Crohn's disease, diabetes, Duchenne muscular dystrophy, embryonal carcinoma, endotoxic shock, environmental stress (e.g., by heat, UV or chemicals), gastrointestinal disorders, glioblastoma multiform, graft vs. host disease, Hodgkin's disease, inflammatory bowel disease, ischemia, stroke, lymphoma, macular degeneration, malignant cytokine production, malignant fibrous histiocytoma, melanoma, meningioma, mesothelioma, multiple sclerosis, nasal congestion, pain, Parkinson's disease, prostate carcinoma, psoriasis, rhabdomyosarcoma, psychotic or neurological disorders (e.g., anxiety, depression, schizophrenia, dementia, mental retardation, memory loss, epilepsy, locomotor problems, respiratory disorders, asthma, eating/body weight disorders including obesity, bulimia, diabetes, anorexia, nausea, hypertension, hypotension), renal disorders, reperfusion injury, rheumatoid arthritis, sarcoma (e.g., chondrosarcoma, Ewing's sarcoma, osteosarcoma), septicemia, seminoma, sexual/reproductive disorders, tonsil, transitional carcinoma of the bladder, transplant rejection, trauma, tuberculosis, ulcers, ulcerative colitis, urinary retention, vascular and cardiovascular disorders, or any other disease or disorder in which G protein-coupled receptors are involved, as well as learning and/or memory disorders, diabetes, pain perception disorders, anorexia, obesity, hormonal release problems, or any other disease or disorder in which a specific GPCR is involved or that would be readily apparent to those skilled in the art in view of the present application.

### EXAMPLES

[0367] The Examples below provide information as follows: Example 1 relates to the identification and selection of the antigens set forth in FIG. 2. Examples 2 to 4 relate to antibody production and purification based on such antigens. Examples 5 to 10 relate to H&E staining. And, Example 11 relates to Western blot analyses.

### Example 1

### Selection of Antigens

[0368] Antigenic peptides were derived from the amino acid sequence of a particular GPCR based on analyses of likely antigen-containing regions and specificity of those regions for the protein/gene of interest. The specificity of the antigen peptides (approximately 20 amino acids in length) for antibody generation was determined using the outlined techniques, including BLAST of several public databases. These public databases included but were not limited to GenBank, Swiss Prot Human, Swiss Prot NonHuman, GenPeptH, GenPept M, and LifeSpan's proprietary databases. With respect to specificity, parameters that precluded the use of a particular peptide included the presence of 6 or more contiguous amino acids with sequence identity to protein(s) other than the protein of interest, the presence of sites of posttranslational modification, including phosphorylation and glycosylation, and highly hydrophobic sequences, which could indicate potential in situ localization within the plasma membrane. The peptides were analyzed for antigenicity using the published algorithm of Hopp, T. P., and Woods, K. R, Proc. Natl. Acad. Sci. U.S.A. 78, 3824-3828, (1981). Additional considerations in antigenic peptide design included 1) selection against sequences with multiple prolines in a row, 2) selection against sequences with multiple serines in a row, 3) selection against sequences with multiple lysines in a row, 4) selection against sequences with multiple arginines in a row 5) selection against sequences with multiple aspartic acids in a row, 6) selection against sequences with multiple glutamic acids in a row, 7) selection against peptides containing methionine or tryptophan, which can become oxidized as a result of the cyclization reaction, and 8) avoidance of stretches of 5 or more amino acids having no uncharged amino acids (which also resulted in a desirable charge to peptide length ratio of at least 1 charge: 5 residues). The selected antigenic peptides are set forth in the Sequence Listing and in FIG. 2.

### Example 2

### Antibody Production Schedule

[0369] Day 0—Pre-immune serum collection (approximately 5.0 ml). Immunize using 200 μg antigen peptide per rabbit in Complete Freund's Adjuvant.

[0370] Day 14—Immunize using 100 μg antigen per rabbit in Incomplete Freund's Adjuvant.

[0371] Day 28—Immunize using 100 μg antigen per rabbit in Incomplete Freund's Adjuvant.

[0372] Day 42—Immunize using 100 μg antigen per rabbit in Incomplete Freund's Adjuvant.

[0373] Day 49—First production bleed; obtain 24.0-26.0 ml.

[0374] Day 56—Immunize using 100 μg antigen per rabbit in Incomplete Freund's Adjuvant.

[0375] Day 63—Second production bleed and ELISA analysis.

[0376] Day 70—Immunize using 100 μg antigen per rabbit in Incomplete Freund's Adjuvant.

[0377] Day 77—Third production bleed and affinity purification.

### Example 3

### Immunosorbent Purification of Antiserum: Coupling of Peptide to CNBr-Activated Sepharose 4

[0378] Weigh out 0.8 g of CNBr-activated Sepharose 4B (2.5 ml of final gel volume). Wash and re-swell on sintered glass filter with 1 mM HCl, followed by coupling buffer (0.1 M NaHCO₃, 0.25 M NaCl, pH 8.5). Dissolve 10 mg of protein or peptide in coupling buffer. Mix protein solution with gel suspension and incubate 2 hours at room temperature or overnight at 4° C. Block remaining active groups with 0.2 M glycine buffer, pH 8.1. Wash away excess adsorbed protein with coupling buffer, followed by 0.1 M acetate buffer containing 0.5 M NaCl, pH 4.3. Equilibrate the column with phosphate-buffered saline (PBS), pH 7.7.

### Example 4

### Immunosorbent Purification of Antiserum Affinity Purification of Antiserum

[0379] Dilute 10 ml of clear antiserum 1:1 with PBS, pH 7.7, apply to affinity column at a flow rate of 0.3 ml/minute, and monitor absorbance of eluate at 280 nm. Collect fractions of unbound material and rinse column with PBS, pH 7.7. Elute bound antibody with 0.2 M glycine, pH 1.85, and collect eluate until absorbance at 280 nm returns to baseline. Neutralize all collected fractions with 1 M Tris-HCl, pH 8.5 immediately after collection. Determine OD at 280 nm, and determine the total OD recovered. Conduct ELISA analysis with the corresponding antigen to confirm the presence and identity of recovered antibody and the removal of all antibody from the original serum. Concentrate antibody to approximately 2.0 mg/ml and dialyze against PBS with 0.01% NaN₃.

### Example 5

### Preparation of Antibody Dilutions

[0380] The purpose of this protocol is to dilute antibodies in solution. Materials include Tris-HCl Buffer with carrier protein and 0.015 M NaN₃ (Dako Antibody Diluent #S0809 (DAKO, Carpentaria, Calif.); vials containing the antibodies described above or commercial antibodies against the particular GPCR; pipetmen and disposable tips; container of chopped ice; 12 ml Dako reagent tubes; and, reagent tube rack.

[0381] The procedure is a) calculate proportions of antibody and diluent according to desired concentrations and volume requirements; b) label reagent tubes and place in rack; c) pipette needed volume of diluent into tube(s); d) place vials of antibodies into ice; e) invert and/or flick antibody vial(s) 3 or 4 times to insure suspension; f) pipette required volume of antibody(s) into corresponding diluent volumes; and, g) mix gently.

### Example 6

### Preparation of Autostainer Solutions

[0382] The purpose of this protocol is the preparation of concentrated solutions for use in a DAKO autostainer. Materials include DAKO® TBST (Tris Buffered Saline Containing Tween-S3306), 10× Concentrate, DAKO® Target Retrieval Solution, 10× Concentrate (S1699), deionized H₂O, 20L container, with lid, marked at the 10L level, DAKO® TBS (Tris Buffered Saline-S 1968), and DAKO Tween® (S 1966).

[0383] The procedure to make TBST 10× Concentrate is a) pour 2 500 ml bottles DAKO® TBST into a 20 L container, b) add deionized H₂O until solution level is at 10 L mark, c) replace lid and shake 10 to 20 times, d) pour diluted DAKO® TBST into autostainer carboy(s) as designated. The procedure to make Target Retrieval Solution is a) measure 135 ml of deionized H₂O and pour into slide bath, b) measure 15 ml of DAKO® Target Retrieval solution, c) add to H₂O, and d) agitate. This solution is then used in the steam method of target retrieval, Example 9, below. The procedure to make TBS is a) fill 20L container to 10L mark with deionized H₂O, b) add 2 envelopes of DAKO® TBS, c) add 5 ml of DAKO TWEEN®, and d) replace lid and agitate 10 to 20 times.

### Example 7

### Preparation of Solutions for Antibody Detection

[0384] Solutions for antibody detection are prepared using Vector® Biotinylated antibody (BA series), Vectastain® ABC-AP Kit (AK-5000), 10 mM sodium phosphate, pH 7.5, 0.9% saline (PBS), Vector® Red Alkaline Phosphatase Substrate Kit I (SK-5100), and 100 mM Tris-HCl, pH 8.2 Buffer. To prepare biotinylated antibody, add 10 ml of PBS to reagent tube, add 1 drop biotinylated antibody to the PBS, then mix gently. To prepare ABC, to 10 ml of PBS, add 2 drops each of Reagent A and Reagent B, mix immediately, then allow to stand 30 minutes before use. To prepare AP Red, which should be prepared immediately before use, to 5 ml of Tris-HCl buffer, add 2 drops of Reagent 1 and mix well, add 2 drops of Reagent 2 and mix well, then add 2 drops of Reagent 3 and mix well.

### Example 8

### Deparaffinization and Rehydration of Samples

[0385] The purpose of this protocol is to remove paraffin from and rehydrate preserved tissues in preparation for IHC procedures. Materials and equipment include fume hood, vertical slide rack(s), three xylene (VWR #72060-088) baths, three 100% alcohol blend (VWR #72060-050) baths, two 95% alcohol blend (VWR #72060-052) baths, one 70% alcohol blend (VWR #72060-056) bath, and Tris-Buffered Saline (DAKO® S1968)+Tween® (DAKO S1966).

[0386] Insert the slides into the vertical rack(s). Move slides through baths inside fume hood as follows:

[0387] Xylene 5 Minutes

[0388] Xylene 5 Minutes

[0389] Xylene 5 Minutes

[0390] 100% Alcohol 2 Minutes

[0391] 100% Alcohol 2 Minutes

[0392] 100% Alcohol 1 Minute

[0393] 95% Alcohol 2 Minutes

[0394] 95% Alcohol 2 Minutes

[0395] 70% Alcohol 1 Minute

[0396] Finally, place slides into a container with TBST.

### Example 9

### Steam Method of Target Retrieval

[0397] The purpose of this protocol is to optimize antibody binding within paraffin embedded tissues. Materials and equipment included a steamer, deionized H₂O, target retrieval solution, 10× concentrate (DAKO #S 1699), 250 ml graduated cylinder, 15 ml graduated cylinder, staining dish(es), and deparaffinized and rehydrated tissue on microscope slides in immersed TBST. The procedure is to a) fill the steamer with deionized H20 to appropriate depth as indicated, b) turn the steamer on, c) in a graduated cylinder, measure 135 ml of deionized H₂O and pour into staining dish(es), d) pipette 15 ml of target retrieval solution and release into deionized H₂O, e) place the staining dish(es) into the basket of the steamer and heat for at least 10 minutes to preheat, f) add rack(s) containing tissue slides to heated target retrieval solution, g) cover and steam for 20 minutes, h) remove container from steamer and let stand at room temperature for 20 minutes, i) transfer rack(s) with slides to container(s) of TBST, and j) slides are now ready for staining procedures.

### Example 10

### Antibody Detection

[0398] The deparaffinized, rehydrated, and steamed (if needed) slides are loaded onto racks within a DAKO autostainer and then the autostainer is run according to the manufacturer's instructions. The slides are removed and the autostainer is turned off.

### Example 11

### Western BLOTTING

[0399] The purpose of this protocol is to visualize the immunoreactivity of the antibodies described above against the particular GPCR on a western blot. Materials and equipment included western blot membrane, TBS Tween (TBST: 100 mM Tris-HCl pH 7.5, 150 mM NaCl, 0.1% Tween™ 20), 5% non-fat dried milk in TBST (blotto), antibody of interest (primary), peroxidase-conjugated AffiniPure goat anti-rabbit IgG (H+L) (secondary)—Jackson ImmunoResearch, ECL solution (Amersham Biosciences, Uppsala Sweden), film, developer D-19, fixer, rocking platform.

[0400] During the blotting procedure, the blot is kept wet at all times and on a substantially level surface. The Western blot is placed right-side up in 10 ml of blotto. The membrane is flipped over and the dish rocked so that the solution covered it. The membrane is then flipped back to the right side and solution is again rocked over it. The blot is then placed on a shaker for at least 1 hour. Ten ml of primary antibody are prepared by diluting 1:500 in blotto.

[0401] The blotto is removed from the Western blot and replaced with the primary antibody. The blot is flipped again and placed on the shaker for 1 hour. Secondary antibody and peroxidase-conjugated AffiniPure goat anti-rabbit IgG (H+L) are prepared 1:20,000 in 10 ml of blotto. The primary antibody is removed and the Western blot is washed 3 times with 10 ml of blotto. The blotto is removed and replaced with the secondary antibody solution. The blot is flipped and placed on the shaker for 1 hour. The secondary antibody is removed and the blot washed 2 times with 10 ml of blotto. The blotto is removed and the blot is washed 2 times with 10 ml TBST. ECL is prepared by combining equal amounts of Solution 1 and 2.

[0402] The blotto is removed and 1 ml of ECL is placed on the blot. The blot is flipped and let sit for 1 minute. The blot is placed on plastic wrap and immediately covered with plastic wrap. The ECL is pressed out. The blot is placed on the film, then the film is developed.

[0403] From the foregoing, it will be appreciated that, although specific embodiments of the invention have been described herein for purposes of illustration, various modifications may be made without deviating from the spirit and scope of the invention. Accordingly, the invention includes all permutations and combinations of the subject matter set forth herein and is not limited except as by the appended claims.

[0404] Sequence Listing:

[0405] Provided On Accompanying Diskette

The application's sequence listing, which the Patent Office published only in electronic form, follows.

SEQUENCE LISTING (2292 sequences)

SEQ ID NO: 1 - DNA, 1266 bp, Homo sapiens
atggatgtgctcagccctggtcagggcaacaacaccacatcaccaccggctccctttgagaccggcggcaacactactggtatctccgacgtgaccgtcagctaccaagtgatcacctctctgctgctgggcacgctcatcttctgcgcggtgctgggcaatgcgtgcgtggtggctgccatcgccttggagcgctccctgcagaacgtggccaattatcttattggctctttggcggtcaccgacctcatggtgtcggtgttggtgctgcccatggccgcgctgtatcaggtgctcaacaagtggacactgggccaggtaacctgcgacctgttcatcgccctcgacgtgctgtgctgcacctcatccatcttgcacctgtgcgccatcgcgctggacaggtactgggccatcacggaccccatcgactacgtgaacaagaggacgccccggccgcgtgcgctcatctcgctcacttggcttattggcttcctcatctctatcccgcccatcctgggctggcgcaccccggaagaccgctcggaccccgacgcatgcaccattagcaaggatcatggctacactatctattccacctttggagctttctacatcccgctgctgctcatgctggttctctatgggcgcatattccgagctgcgcgcttccgcatccgcaagacggtcaaaaaggtggagaagaccggagcggacacccgccatggagcatctcccgccccgcagcccaagaagagtgtgaatggagagtcggggagcaggaactggaggctgggcgtggagagcaaggctgggggtgctctgtgcgccaatggcgcggtgaggcaaggtgacgatggcgccgccctggaggtgatcgaggtgcaccgagtgggcaactccaaagagcacttgcctctgcccagcgaggctggtcctaccccttgtgcccccgcctctttcgagaggaaaaatgagcgcaacgccgaggcgaagcgcaagatggccctggcccgagagaggaagacagtgaagacgctgggcatcatcatgggcaccttcatcctctgctggctgcccttcttcatcgtggctcttgttctgcccttctgcgagagcagctgccacatgcccaccctgttgggcgccataatcaattggctgggctactccaactctctgcttaaccccgtcatttacgcatacttcaacaaggactttcaaaacgcgtttaagaagatcattaagtgtaacttctgccgccagtga

SEQ ID NO: 2 - protein, 421 aa, Homo sapiens
MDVLSPGQGNNTTSPPAPFETGGNTTGISDVTVSYQVITSLLLGTLIFCAVLGNACVVAAIALERSLQNVANYLIGSLAVTDLMVSVLVLPMAALYQVLNKWTLGQVTCDLFIALDVLCCTSSILHLCAIALDRYWAITDPIDYVNKRTPRPRALISLTWLIGFLISIPPILGWRTPEDRSDPDACTISKDHGYTIYSTFGAFYIPLLLMLVLYGRIFRAARFRIRKTVKKVEKTGADTRHGASPAPQPKKSVNGESGSRNWRLGVESKAGGALCANGAVRQGDDGAALEVIEVHRVGNSKEHLPLPSEAGPTPCAPASFERKNERNAEAKRKMALARERKTVKTLGIIMGTFILCWLPFFIVALVLPFCESSCHMPTLLGAIINWLGYSNSLLNPVIYAYFNKDFQNAFKKIIKCNFCRQ

SEQ ID NO: 3 - DNA, 1173 bp, Homo sapiens
atggaggaaccgggtgctcagtgcgctccaccgccgcccgcgggctccgagacctgggttcctcaagccaacttatcctctgctccctcccaaaactgcagcgccaaggactacatttaccaggactccatctccctaccctggaaagtactgctggttatgctattggcgctcatcaccttggccaccacgctctccaatgcctttgtgattgccacagtgtaccggacccggaaactgcacaccccggctaactacctgatcgcctctctggcggtcaccgacctgcttgtgtccatcctggtgatgcccatcagcaccatgtacactgtcaccggccgctggacactgggccaggtggtctgtgacttctggctgtcgtcggacatcacttgttgcactgcctccatcctgcacctctgtgtcatcgccctggaccgctactgggccatcacggacgccgtggagtactcagctaaaaggactcccaagagggcggcggtcatgatcgcgctggtgtgggtcttctccatctctatctcgctgccgcccttcttctggcgtcaggctaaggccgaagaggaggtgtcggaatgcgtggtgaacaccgaccacatcctctacacggtctactccacggtgggtgctttctacttccccaccctgctcctcatcgccctctatggccgcatctacgtagaagcccgctcccggattttgaaacagacgcccaacaggaccggcaagcgcttgacccgagcccagctgataaccgactcccccgggtccacgtcctcggtcacctctattaactcgcgggttcccgacgtgcccagcgaatccggatctcctgtgtatgtgaaccaagtcaaagtgcgagtctccgacgccctgctggaaaagaagaaactcatggccgctagggagcgcaaagccaccaagaccctagggatcattttgggagcctttattgtgtgttggctacccttcttcatcatctccctagtgatgcctatctgcaaagatgcctgctggttccacctagccatctttgacttcttcacatggctgggctatctcaactccctcatcaaccccataatctataccatgtccaatgaggactttaaacaagcattccataaactgatacgttttaagtgcacaagttga

SEQ ID NO: 4 - protein, 390 aa, Homo sapiens
MEEPGAQCAPPPPAGSETWVPQANLSSAPSQNCSAKDYIYQDSISLPWKVLLVMLLALITLATTLSNAFVIATVYRTRKLHTPANYLIASLAVTDLLVSILVMPISTMYTVTGRWTLGQVVCDFWLSSDITCCTASILHLCVIALDRYWAITDAVEYSAKRTPKRAAVMIALVWVFSISISLPPFFWRQAKAEEEVSECVVNTDHILYTVYSTVGAFYFPTLLLIALYGRIYVEARSRILKQTPNRTGKRLTRAQLITDSPGSTSSVTSINSRVPDVPSESGSPVYVNQVKVRVSDALLEKKKLMAARERKATKTLGIILGAFIVCWLPFFIISLVMPICKDACWFHLAIFDFFTWLGYLNSLINPIIYTMSNEDFKQAFHKLIRFKCTS

SEQ ID NO: 5 - DNA, 1200 bp, Homo sapiens
agccaaatgtgtggaggtctgtgggaagagagagccacctagcatgtccccactgaaccagtcagcagaaggccttccccaggaggcctccaacagatccctgaatgccacagaaacctcagaggcttgggatcccaggaccctccaggcgctcaagatctcccttgccgtggtcctttccgtcatcacactggccacagtcctctccaatgcctttgtactcaccaccatcttactcaccaggaagctccacacccctgccaactacctgattggctccctggccaccaccgacctcttggtttccatcttggtaatgcccatcagcatcgcctataccatcacccacacctggaactttggccaaatcttgtgtgacatctggctgtcctctgacatcacgtgctgcacagcctccatcctgcatctctgtgtcattgctctggacaggtactgggcaatcacagatgccctggaatacagtaaacgcaggacggctggccacgcggccaccatgatcgccattgtctgggccatctccatctgcatctccatccccccgctcttctggcggcaggccaaggcccaggaggagatgtcggactgtctggtgaacacctctcagatctcctacaccatctactccacctgtggggccttctacattccctcggtgttgctcatcatcctatatggccggatctaccgggctgcccggaaccgcatcctgaatccaccctcactctatgggaagcgcttcaccacggcccacctcatcacaggctctgccgggtcctcgctctgctcgctcaactccagcctccatgaggggcactcgcactcggctggctcccctctctttttcaaccacgtgaaaatcaagcttgctgacagtgccctggaacgcaagaggatttctgctgctcgagaaaggaaagccactaaaatcctgggcatcattctgggggcctttatcatctgctggctgcccttcttcgtggtgtctctggtcctccccatctgccgggactcctgctggatccacccggcgctctttgacttcttcacctggctaggctatttaaactccctcatcaatccaataatctacactgtgtttaatgaagagtttcggcaagcttttcagaaaattgtccctttccggaaggcctcctagtcttattcgatgaggtaaagaaa

SEQ ID NO: 6 - protein, 377 aa, Homo sapiens
MSPLNQSAEGLPQEASNRSLNATETSEAWDPRTLQALKISLAVVLSVITLATVLSNAFVLTTILLTRKLHTPANYLIGSLATTDLLVSILVMPISIAYTITHTWNFGQILCDIWLSSDITCCTASILHLCVIALDRYWAITDALEYSKRRTAGHAATMIAIVWAISICISIPPLFWRQAKAQEEMSDCLVNTSQISYTIYSTCGAFYIPSVLLIILYGRIYRAARNRILNPPSLYGKRFTTAHLITGSAGSSLCSLNSSLHEGHSHSAGSPLFFNHVKIKLADSALERKRISAARERKATKILGIILGAFIICWLPFFVVSLVLPICRDSCWIHPALFDFFTWLGYLNSLINPIIYTVFNEEFRQAFQKIVPFRKAS

SEQ ID NO: 7 - DNA, 1930 bp, Homo sapiens
atcgaatgttgagagaagcagtgctctgatccagctcaggagaaaaaggagcgggttccgagtgagacttctggagccagctggacgtgccggtttgcccagtgcggcgcggctgcacgcaccgtccacaagagtctcagtcgcccaggctggagtgcagcagcacagtctcacctcattgcaacctccgcctcccgggttcgcgggttctccgcctcagcttcctagtagctgggattgcaggcactcaccaccatgcccggctaattttttgaatttttagtggagacgggatttcaccatgttggccatgctggtcttgaacccccgacctcggatgattcgcccgcctcggcctcccaaagtgctggaattacaggcgaaccttcactcagaagaaatgctgtggcccttccctttaccaacagaaaatggaacacaagagaccacatagctgaacaaattatagcctccttacaagtgagaaaccttcgaggctacatagttttcagccaaaggaaaataaccaacagcttctccacagtgtagactgaaacaagggaaacatgaacatcacaaactgtaccacagaggccagcatggctataagacccaagaccatcactgagaagatgctcatttgcatgactctggtggtcatcaccaccctcaccacgttgctgaacttggctgtgatcatggctattggcaccaccaagaagctccaccagcctgccaactacctaatctgttctctggccgtgacggacctcctggtggcagtgctcgtcatgcccctgagcatcatctacattgtcatggatcgctggaagcttgggtacttcctctgtgaggtgtggctgagtgtggacatgacctgctgcacctgctccatcctccacctctgtgtcattgccctggacaggtactgggccatcaccaatgctattgaatacgccaggaagaggacggccaagagggccgcgctgatgatccttaccgtctggaccatctccattttcatctccatgccccctctgttctggagaagccaccgccgcctaagccctccccctagtcagtgcaccatccagcacgaccatgttatctacaccatttactccacgctgggtgcgttttatatccccttgactttgatactgattctctattaccggatttaccacgcggccaagagcctttaccagaaaaggggatcaagtcggcacttaagcaacagaagcacagatagccagaattcttttgcaagttgtaaacttacacagactttctgtgtgtctgacttctccacctcagaccctaccacagagtttgaaaagttccatgcctccatcaggatcccccccttcgacaatgatctagatcacccaggagaacgtcagcagatctctagcaccagggaacggaaggcagcacgcatcctggggctgattctgggtgcattcattttatcctggctgccatttttcatcaaagagttgattgtgggtctgagcatctacaccgtgtcctcggaagtggccgactttctgacgtggctcggttatgtgaattctctgatcaaccctctgctctatacgagttttaatgaagactttaagctggcttttaaaaagctcattagatgccgagagcatacttagactgtaaaaagctaaaaggcacgactttttccagagcctcatgagtggatgggggtaaggggtgcaacttattaattcttgaacatacttggttcaggagagtttgtaagtatgtgtggtcttgtttccttgtttgtttgtttgttttgttctgttttgtttgaggattgttatttggcgtgctgttttctacctctggtcttatctgtgatacataatttcaaataaacattatcatacaaaaacaaaaaaaaaaaaaaaaaaaa

SEQ ID NO: 8 - protein, 365 aa, Homo sapiens
MNITNCTTEASMAIRPKTITEKMLICMTLVVITTLTTLLNLAVIMAIGTTKKLHQPANYLICSLAVTDLLVAVLVMPLSIIYIVMDRWKLGYFLCEVWLSVDMTCCTCSILHLCVIALDRYWAITNAIEYARKRTAKRAALMILTVWTISIFISMPPLFWRSHRRLSPPPSQCTIQHDHVIYTIYSTLGAFYIPLTLILILYYRIYHAAKSLYQKRGSSRHLSNRSTDSQNSFASCKLTQTFCVSDFSTSDPTTEFEKFHASIRIPPFDNDLDHPGERQQISSTRERKAARILGLILGAFILSWLPFFIKELIVGLSIYTVSSEVADFLTWLGYVNSLINPLLYTSFNEDFKLAFKKLIRCREHT

SEQ ID NO: 9 - DNA, 1101 bp, Homo sapiens
atggatttcttaaattcatctgatcaaaacttgacctcagaggaactgttaaacagaatgccatccaaaattctggtgtccctcactctgtctgggctggcactgatgacaacaactatcaactcccttgtgatcgctgcaattattgtgacccggaagctgcaccatccagccaattatttaatttgttcccttgcagtcacagattttcttgtggctgtcctggtgatgcccttcagcattgtgtatattgtgagagagagctggattatggggcaagtggtctgtgacatttggctgagtgttgacattacctgctgcacgtgctccatcttgcatctctcagctatagctttggatcggtatcgagcaatcacagatgctgttgagtatgccaggaaaaggactccaaagcatgctggcattatgattacaatagtttggattatatctgtttttatctctatgcctcctctattctggaggcaccaaggaactagcagagatgatgaatgcatcatcaagcacgaccacattgtttccaccatttactcaacatttggagctttctacatcccactggcattgattttgatcctttactacaaaatatatagagcagcaaagacattataccacaagagacaagcaagtaggattgcaaaggaggaggtgaatggccaagtccttttggagagtggtgagaaaagcactaaatcagtttccacatcctatgtactagaaaagtctttatctgacccatcaacagactttgataaaattcatagcacagtgagaagtctcaggtctgaattcaagcatgagaaatcttggagaaggcaaaagatctcaggtacaagagaacggaaagcagccactaccctgggattaatcttgggtgcatttgtaatatgttggcttcctttttttgtaaaagaattagttgttaatgtctgtgacaaatgtaaaatttctgaagaaatgtccaattttttggcatggcttgggtatctcaattcccttataaatccactgatttacacaatctttaatgaagacttcaagaaagcattccaaaagcttgtgcgatgtcgatgttag

SEQ ID NO: 10 - protein, 366 aa, Homo sapiens
MDFLNSSDQNLTSEELLNRMPSKILVSLTLSGLALMTTTINSLVIAAIIVTRKLHHPANYLICSLAVTDFLVAVLVMPFSIVYIVRESWIMGQVVCDIWLSVDITCCTCSILHLSAIALDRYRAITDAVEYARKRTPKHAGIMITIVWIISVFISMPPLFWRHQGTSRDDECIIKHDHIVSTIYSTFGAFYIPLALILILYYKIYRAAKTLYHKRQASRIAKEEVNGQVLLESGEKSTKSVSTSYVLEKSLSDPSTDFDKIHSTVRSLRSEFKHEKSWRRQKISGTRERKAATTLGLILGAFVICWLPFFVKELVVNVCDKCKISEEMSNFLAWLGYLNSLINPLIYTIFNEDFKKAFQKLVRCRC

SEQ ID NO: 11 - DNA, 3016 bp, Homo sapiens
gaattcgggtgagccagctccgggagaacagcatgtacaccagcctcagtgttacagagtgtgggtacatcaaggtgaatggtgagcagaaactataacctgttagtccttctacacctcatctgctacaagttctggcttagacatggatattctttgtgaagaaaatacttctttgagctcaactacgaactccctaatgcaattaaatgatgacaccaggctctacagtaatgactttaactctggagaagctaacacttctgatgcatttaactggacagtcgactctgaaaatcgaaccaacctttcctgtgaagggtgcctctcaccgtcgtgtctctccttacttcatctccaggaaaaaaactggtctgctttactgacagccgtagtgattattctaactattgctggaaacatactcgtcatcatggcagtgtccctagagaaaaagctgcagaatgccaccaactatttcctgatgtcacttgccatagctgatatgctgctgggtttccttgtcatgcccgtgtccatgttaaccatcctgtatgggtaccggtggcctctgccgagcaagctttgtgcagtctggatttacctggacgtgctcttctccacggcctccatcatgcacctctgcgccatctcgctggaccgctacgtcgccatccagaatcccatccaccacagccgcttcaactccagaactaaggcatttctgaaaatcattgctgtttggaccatatcagtaggtatatccatgccaataccagtctttgggctacaggacgattcgaaggtctttaaggaggggagttgcttactcgccgatgataactttgtcctgatcggctcttttgtgtcatttttcattcccttaaccatcatggtgatcacctactttctaactatcaagtcactccagaaagaagctactttgtgtgtaagtgatcttggcacacgggccaaattagcttctttcagcttcctccctcagagttctttgtcttcagaaaagctcttccagcggtcgatccatagggagccagggtcctacacaggcaggaggactatgcagtccatcagcaatgagcaaaaggcatgcaaggtgctgggcatcgtcttcttcctgtttgtggtgatgtggtgccctttcttcatcacaaacatcatggccgtcatctgcaaagagtcctgcaatgaggatgtcattggggccctgctcaatgtgtttgtttggatcggttatctctcttcagcagtcaacccactagtctacacactgttcaacaagacctataggtcagccttttcacggtatattcagtgtcagtacaaggaaaacaaaaaaccattgcagttaattttagtgaacacaataccggctttggcctacaagtctagccaacttcaaatgggacaaaaaaagaattcaaagcaagatgccaagacaacagataatgactgctcaatggttgctctaggaaagcagcattctgaagaggcttctaaagacaatagcgacggagtgaatgaaaaggtgagctgtgtgtgataggctagttgccgtggcaactgtggaaggcacactgagcaagttttcacctatctggaaaaaaaaaatatgagattggaaaaaattagacaagtctagtggaaccaacgatcatatctgtatgcctcattttattctgtcaatgaaaagcggggttcaatgctacaaaatgtgtgcttggaaaatgttctgacagcatttcagctgtgagctttctgatacttatttataacattgtaaatgatatgtctttaaaatgattcacttttattgtataattatgaagccctaagtaaatctaaattaacttctattttcaagtggaaaccttgctgctatgctgttcattgatgacatgggattgagttggttacctattgccgtaaataaaaatagctataaatagtgaaaattttattgaatataatggcctcttaaaaattatctttaaaacttactatggtatatattttgaaaggagaaaaaaaaaaagccactaaggtcagtgttataaaatctgtattgctaagataattaaatgaaatacttgacaacatttttcatagataccattttgaaatattcacaaggttgctggcatttgctgcatttcaagttaattctcagaagtgaaaaagacttcaaatgttattcaataactattgctgctttctcttctacttcttgtgctttactctgaatttccagtgtggtcttgtttaatatttgttcctctaggtaaactagcaaaaggatgatttaacattaccaaatgcctttctagcaattgcttctctaaaacagcactatcgaggtatttggtaacttgctgtgaaatgactgcatcatgcatgcactcttttgagcagtaaatgtatattgatgtaactgtgtcaggattgaggatgaactcaggtttccggctactgacagtggtagagtcctaggacatctctgtaaaaagcaggtgactttcctatgacactcatcaggtaaactgatgctttcagatccatcggtttatactatttattaaaaccattctgcttggttccacaatcatctattgagtgtacatttatgtgtgaagcaaatttctagatatgagaaatataaaaataattaaaacaaaatccttgccttcaaacgaaatggctcggccaggcacggaggctcgtgcatgtaatcctagcactttgggaggctgagatgggaggatcacttgaggccaagagtttgagaccaacctgggtaacaaagtgagacctccctgtctctacaaaaaaaatcaaaaaattatctgatccttgtggcacacaactgtggtcccagctacaggggaggctgagacgcaaggatcacttgagcccagaagctcaaggctgcagtgagccaagttcacaccactgccatttcctcctgggcaacagagtgagaccctatcaccccgaattc

SEQ ID NO: 12 - protein, 471 aa, Homo sapiens
MDILCEENTSLSSTTNSLMQLNDDTRLYSNDFNSGEANTSDAFNWTVDSENRTNLSCEGCLSPSCLSLLHLQEKNWSALLTAVVIILTIAGNILVIMAVSLEKKLQNATNYFLMSLAIADMLLGFLVMPVSMLTILYGYRWPLPSKLCAVWIYLDVLFSTASIMHLCAISLDRYVAIQNPIHHSRFNSRTKAFLKIIAVWTISVGISMPIPVFGLQDDSKVFKEGSCLLADDNFVLIGSFVSFFIPLTIMVITYFLTIKSLQKEATLCVSDLGTRAKLASFSFLPQSSLSSEKLFQRSIHREPGSYTGRRTMQSISNEQKACKVLGIVFFLFVVMWCPFFITNIMAVICKESCNEDVIGALLNVFVWIGYLSSAVNPLVYTLFNKTYRSAFSRYIQCQYKENKKPLQLILVNTIPALAYKSSQLQMGQKKNSKQDAKTTDNDCSMVALGKQHSEEASKDNSDGVNEKVSCV

SEQ ID NO: 13 - DNA, 1790 bp, Homo sapiens
tactaaccatgctgaccactgttcggaacgggattgaatcacagaaaaacagcaaatggctctctcttacagagtgtctgaacttcaaagcacaattcctgagcacattttgcagagcacctttgttcacgttatctcttctaactggtctggattacagacagaatcaataccagaggaaatgaaacagattgttgaggaacagggaaataaactgcactgggcagctcttctgatactcatggtgataatacccacaattggtggaaatacccttgttattctggctgtttcactggagaagaagctgcagtatgctactaattactttctaatgtccttggcggtggctgatttgctggttggattgtttgtgatgccaattgccctcttgacaataatgtttgaggctatgtggcccctcccacttgttctatgtcctgcctggttatttcttgacgttctcttttcaaccgcatccatcatgcatctctgtgccatttcagtggatcgttacatagccatcaaaaagccaatccaggccaatcaatataactcacgggctacagcattcatcaagattacagtggtgtggttaatttcaataggcattgccattccagtccctattaaagggatagagactgatgtggacaacccaaacaatatcacttgtgtgctgacaaaggaacgttttggcgatttcatgctctttggctcactggctgccttcttcacacctcttgcaattatgattgtcacctactttctcactatccatgctttacagaagaaggcttacttagtcaaaaacaagccacctcaacgcctaacatggttgactgtgtctacagttttccaaagggatgaaacaccttgctcgtcaccggaaaaggtggcaatgctggatggttctcgaaaggacaaggctctgcccaactcaggtgatgaaacacttatgcgaagaacatccacaattgggaaaaagtcagtgcagaccatttccaacgaacagagagcctcaaaggtcctagggattgtgtttttcctctttttgcttatgtggtgtcccttctttattacaaatataactttagttttatgtgattcctgtaaccaaactactctccaaatgctcctggagatatttgtgtggataggctatgtttcctcaggagtgaatcctttggtctacaccctcttcaataagacatttcgggatgcatttggccgatatatcacctgcaattaccgggccacaaagtcagtaaaaactctcagaaaacgctccagtaagatctacttccggaatccaatggcagagaactctaagtttttcaagaaacatggaattcgaaatgggattaaccctgccatgtaccagagtccaatgaggctccgaagttcaaccattcagtcttcatcaatcattctactagatacgcttctcctcactgaaaatgaaggtgacaaaactgaagagcaagttagttatgtatagcagaactggcagttgtcatcaaacataatgatgagtaagatgatgaatgagatgtaaatgtgcccagaatatattatataaagaattttatgtcatatatcaaatcatctctttaacctaagatgtaagtattaagaatatctaattttcctaatttggacaagattattccatgaggaaaataattttatatagctacaaatgaaaacaatccagcactctggttaaattttaaggtattcgaatgaaataaagtcaaatcaataaatttcaggctttaaaaaaaaaa

SEQ ID NO: 14 - protein, 481 aa, Homo sapiens
MALSYRVSELQSTIPEHILQSTFVHVISSNWSGLQTESIPEEMKQIVEEQGNKLHWAALLILMVIIPTIGGNTLVILAVSLEKKLQYATNYFLMSLAVADLLVGLFVMPIALLTIMFEAMWPLPLVLCPAWLFLDVLFSTASIMHLCAISVDRYIAIKKPIQANQYNSRATAFIKITVVWLISIGIAIPVPIKGIETDVDNPNNITCVLTKERFGDFMLFGSLAAFFTPLAIMIVTYFLTIHALQKKAYLVKNKPPQRLTWLTVSTVFQRDETPCSSPEKVAMLDGSRKDKALPNSGDETLMRRTSTIGKKSVQTISNEQRASKVLGIVFFLFLLMWCPFFITNITLVLCDSCNQTTLQMLLEIFVWIGYVSSGVNPLVYTLFNKTFRDAFGRYITCNYRATKSVKTLRKRSSKIYFRNPMAENSKFFKKHGIRNGINPAMYQSPMRLRSSTIQSSSIILLDTLLLTENEGDKTEEQVSYV

SEQ ID NO: 15 - DNA, 4775 bp, Homo sapiens
acccgcgcgaggtaggcgctctggtgcttgcggaggacgcttccttcctcagatgcaccgatcttcccgatactgcctttggagcggctagattgctagccttggctgctccattggcctgccttgccccttacctgccgattgcatatgaactcttcttctgtctgtacatcgttgtcgtcggagtcgtcgcgatcgtcgtggcgctcgtgtgatggccttcgtccgtttagagtagtgtagttagttaggggccaacgaagaagaaagaagacgcgattagtgcagagatgctggaggtggtcagttactaagctagagtaagatagcggagcgaaaagagccaaacctagccggggggcgcacggtcacccaaaggaggtcgactcgccggcgcttcctatcgcgccgagctccctccattcctctccctccgccgaggcgcgaggttgcggcgcgcagcgcagcgcagctcagcgcaccgactgccgcgggctccgctgggcgattgcagccgagtccgtttctcgtctagctgccgccgcggcgaccgctgcctggtcttcctcccggacgctagtgggttatcagctaacacccgcgagcatctataacataggccaactgacgccatccttcaaaaacaactaaaggatgatatgatgaacctagcctgttaatttcgtcttctcaattttaaactttggttgcttaagactgaagcaatcatggtgaacctgaggaatgcggtgcattcattccttgtgcacctaattggcctattggtttggcaatgtgatatttctgtgagcccagtagcagctatagtaactgacattttcaatacctccgatggtggacgcttcaaattcccagacggggtacaaaactggccagcactttcaatcgtcatcataataatcatgacaataggtggcaacatccttgtgatcatggcagtaagcatggaaaagaaactgcacaatgccaccaattacttcttaatgtccctagccattgctgatatgctagtgggactacttgtcatgcccctgtctctcctggcaatcctttatgattatgtctggccactacctagatatttgtgccccgtctggatttctttagatgttttattttcaacagcgtccatcatgcacctctgcgctatatcgctggatcggtatgtagcaatacgtaatcctattgagcatagccgtttcaattcgcggactaaggccatcatgaagattgctattgtttgggcaatttctataggtgtatcagttcctatccctgtgattggactgagggacgaagaaaaggtgttcgtgaacaacacgacgtgcgtgctcaacgacccaaatttcgttcttattgggtccttcgtagctttcttcataccgctgacgattatggtgattacgtattgcctgaccatctacgttctgcgccgacaagctttgatgttactgcacggccacaccgaggaaccgcctggactaagtctggatttcctgaagtgctgcaagaggaatacggccgaggaagagaactctgcaaaccctaaccaagaccagaacgcacgccgaagaaagaagaaggagagacgtcctaggggcaccatgcaggctatcaacaatgaaagaaaagcttcgaaagtccttgggattgttttctttgtgtttctgatcatgtggtgcccatttttcattaccaatattctgtctgttctttgtgagaagtcctgtaaccaaaagctcatggaaaagcttctgaatgtgtttgtttggattggctatgtttgttcaggaatcaatcctctggtgtatactctgttcaacaaaatttaccgaagggcattctccaactatttgcgttgcaattataaggtagagaaaaagcctcctgtcaggcagattccaagagttgccgccactgctttgtctgggagggagcttaatgttaacatttatcggcataccaatgaaccggtgatcgagaaagccagtgacaatgagcccggtatagagatgcaagttgagaatttagagttaccagtaaatccctccagtgtggttagcgaaaggattagcagtgtgtgagaaagaacagcacagtcttttcctacggtacaagctacatatgtaggaaaattttcttctttaatttttctgttggtcttaactaatgtaaatattgctgtctgaaaaagtgtttttacatatagctttgcaaccttgtactttacaatcatgcctacattagtgagatttagggttctatatttactgtttataataggtggagactaacttattttgattgtttgatgaataaaatgtttatttttgctctccctcccttctttccttccttttttcctttcttccttcctttctctctttcttttgtgcatatggcaacgttcatgttcatctcaggtggcatttgcaggtgaccagaatgaggcacatgacagtggttatatttcaaccacacctaaattaacaaattcagtggacatttgttctgggttaacagtaaatatacactttacattcttgctctgctcatctacacatataaacacagtaagataggttctgctttctgatacatctgtcagtgagtcagaggcagaacctagtcttgttgttcatataggggcaaaaatttgacattgtcagaatgttgtgttggtatttactgcaatgtctgtccctaaacatagtggtattttaacatagcagctggttaaccgggactacagaagtggaaggataatgagatgtaatacaccaaatagcttttcacttcttaaggacagtgttcaaattctgattattacaacaagcaaactgaaattagtgttttcattctggtccttagtaaattcctaattctatgattaaactgggaaatgagatcccagagttatttcccaacccaggattcaacatcaattgggttttgatctcagcatcctggaaatttgtgtgcttcacacaaagtgaaattagtattttgagccttattaaaatattttcttaattatggtacctctgtctataggacttaatttagcagtccatttttgagtaaaacttgtattggaagtatagatggtagaaactttggaagttttacttgattaaggactacagaattgggcccttagaatgtgaaaaaaaaaagtaattaaaaagacacttttaccgaactcgggattacagaaacacggagtttccatttggattttaaacaaaatttatgtcattttcagatccttccaaactctctagtgcaggaaaaggctgcagctaatttgtgaaagtggcaagctcttcattgcactgcagttatttaccagaagtttaaatctttgttaaaatatagtgttgtgttacaataagtgttggccatcatttcattcgtgggcctgctgctctctaagaattcagtagcattttaatagtttctaaaccatgaaaagttttcaagcattgctaaagtcaggccattcagtctatgctgtgtgcagagtatacaagtgtttctagtaacagtatttccatacgtgcccatttcacacaactgtggataaattttggaagaattcatgatgctagttcttacgcttgacagttacttacacacctgagaatgtgcctctcagtatcttaaaattggttaatgaaaaatctgaatttctaaaacccttggtctgtgttctcaacacacagtatagataaatccaatagtctgccacaagggcagtggaagagctgctgtatttgaggaaactcatacagtctctatttgatttgcaacactggccaaacatcagtcatttgcttgagcatgcccaaatattacatgaaagtcaagtctacctgccttgcctgttaggtctgttgaagtgcatgttaaaataattatatgaagcagaatgagatgatttaattcttaccgaaatgaaaatggctgaagaaacacagcatgcatttagcatgagttctgcacatacagatggtgtcctgcatgtatgccatgtatgttgcatgaatccatcgatttgtattaatgtagggcagaatagctgatagaagaaggactgaagaaaatccttcagcaatccttaaaaagaccatgcattcagatctgaagtagtgtgagtgttagaaaaaactggaaacatctgatttctgaactatcagggcaagctcatagcacatgttttacaaagaaacaaaatataaatcacagatttccaaaagtactagcaataagttgaatgataatagctcacagcacatttgttaatgattcttgtgtcatcaagtagtagtacttaatagtacccaacctggtaattatcctcaagttgtgtgctattcgtaagttctgtgcagtttggtatgaaacaaatatactcatttggatataaatcttacccttcaatgttaaatctacaaacttttataaatgttttaaagaagtccatgtgataattgtaaaggtgatgaatttaccatcaaacaaatcattttgatgtattattatatatgtatatctgtgtaagacacgtgcaacagactgccttatattattttctgtaattcttctcctttgtcaaatggtattttttgtgaatggttgcaaagtgttgtcttattcctaattcctgtatgttatccactacaggttttatgagacttcctattaatttattaaatttattaaatgttgaaaaaaaaaaaaaaaaaaaaaaa

SEQ ID NO: 16 - protein, 458 aa, Homo sapiens
MVNLRNAVHSFLVHLIGLLVWQCDISVSPVAAIVTDIFNTSDGGRFKFPDGVQNWPALSIVIIIIMTIGGNILVIMAVSMEKKLHNATNYFLMSLAIADMLVGLLVMPLSLLAILYDYVWPLPRYLCPVWISLDVLFSTASIMHLCAISLDRYVAIRNPIEHSRFNSRTKAIMKIAIVWAISIGVSVPIPVIGLRDEEKVFVNNTTCVLNDPNFVLIGSFVAFFIPLTIMVITYCLTIYVLRRQALMLLHGHTEEPPGLSLDFLKCCKRNTAEEENSANPNQDQNARRRKKKERRPRGTMQAINNERKASKVLGIVFFVFLIMWCPFFITNILSVLCEKSCNQKLMEKLLNVFVWIGYVCSGINPLVYTLFNKIYRRAFSNYLRCNYKVEKKPPVRQIPRVAATALSGRELNVNIYRHTNEPVIEKASDNEPGIEMQVENLELPVNPSSVVSERISSV

SEQ ID NO: 17 - DNA, 1328 bp, Homo sapiens
cggtgcttatttcctgtaatggacaaacttgatgctaatgtgagttctgaggagggtttcgggtcagtggagaaggtggtgctgctcacgtttctctcgacggttatcctgatggccatcttggggaacctgctggtgatggtggctgtgtgctgggacaggcagctcaggaaaataaaaacaaattatttcattgtatctcttgcttttgcggatctgctggtttcggtgctggtgatgccctttggtgccattgagctggttcaagacatctggatttatggggaggtgttttgtcttgttcggacatctctggacgtcctgctcacaacggcatcgatttttcacctgtgctgcatttctctggataggtattacgccatctgctgccagcctttggtctataggaacaagatgacccctctgcgcatcgcattaatgctgggaggctgctgggtcatccccacgtttatttcttttctccctataatgcaaggctggaataacattggcataattgatttgatagaaaagaggaagttcaaccagaactctaactctacgtactgtgtcttcatggtcaacaagccctacgccatcacctgctctgtggtggccttctacatcccatttctcctcatggtgctggcctattaccgcatctatgtcacagctaaggagcatgcccatcagatccagatgttacaacgggcaggagcctcctccgagagcaggcctcagtcggcagaccagcatagcactcatcgcatgaggacagagaccaaagcagccaagaccctgtgcatcatcatgggttgcttctgcctctgctgggcaccattctttgtcaccaatattgtggatcctttcatagactacactgtccctgggcaggtgtggactgctttcctctggctcggctatatcaattccgggttgaacccttttctctacgccttcttgaataagtcttttagacgtgccttcctcatcatcctctgctgtgatgatgagcgctaccgaagaccttccattctgggccagactgtcccttgttcaaccacaaccattaatggatccacacatgtactaagggatgcagtggagtgtggtggccagtgggagagtcagtgtcacccgccagcaacttctcctttggtggctgctcagcccagtgacacttaggcccctgggacaatgacccagaagacagccatgcctccgaaagagggccaggtcctaagctgctgcttgtgcgcgactgcacccggcattctcttcacctgaggctttccgtccgccagtgcaggaacccggtgctcgctggg

SEQ ID NO: 18 - protein, 388 aa, Homo sapiens
MDKLDANVSSEEGFGSVEKVVLLTFLSTVILMAILGNLLVMVAVCWDRQLRKIKTNYFIVSLAFADLLVSVLVMPFGAIELVQDIWIYGEVFCLVRTSLDVLLTTASIFHLCCISLDRYYAICCQPLVYRNKMTPLRIALMLGGCWVIPTFISFLPIMQGWNNIGIIDLIEKRKFNQNSNSTYCVFMVNKPYAITCSVVAFYIPFLLMVLAYYRIYVTAKEHAHQIQMLQRAGASSESRPQSADQHSTHRMRTETKAAKTLCIIMGCFCLCWAPFFVTNIVDPFIDYTVPGQVWTAFLWLGYINSGLNPFLYAFLNKSFRRAFLIILCCDDERYRRPSILGQTVPCSTTTINGSTHVLRDAVECGGQWESQCHPPATSPLVAAQPSDT

SEQ ID NO: 19 - DNA, 1984 bp, Homo sapiens
cccgagagcgcccattcacccccctcacccacctccccgcgttcccacttccccgcactctgacccggccggacgcccctcccctatcttgccgcccgccccctccagggggctctgctcccaccccagggagcccatccgacctctgcttgacttcccgccgcttccttcaggggcctcggctcatcgggtgcccctccccaaacttccaacccgtttgctccaggagttcctgccccatccccgagggcgcccaaatagccacactgtgtcctcctgtagtcgccgccccctgacctagcgcgacccagcgcccccgcccatgtccccccactcacctcccccggggggcgtggtgagtcgcggtctgttctcacggacggtccccgtccagcctgcgcttcgccggggccctcatctgctttcccgccaccctatcactcccttgccgtccaccctcggtcctcatggtcccagagccgggcccaaccgccaatagcaccccggcctggggggcagggccgccgtcggccccggggggcagcggctgggtggcggccgcgctgtgcgtggtcatcgcgctgacggcggcggccaactcgctgctgatcgcgctcatctgcactcagcccgcgctgcgcaacacgtccaacttcttcctggtgtcgctcttcacgtctgacctgatggtggggctggtggtgatgccgccggccatgctgaacgcgctgtacgggcgctgggtgctggcgcgcggcctctgcctgctctggaccgccttcgacgtgatgtgctgcagcgcctccatcctcaacctctgcctcatcagcctggaccgctacctgctcatcctctcgccgctgcgctacaagctgcgcatgacgcccctgcgtgccctggccctagtcctgggcgcctggagcctcgccgctctcgcctccttcctgcccctgctgctgggctggcacgagctgggccacgcacggccacccgtccctggccagtgccgcctgctggccagcctgccttttgtccttgtggcgtcgggcctcaccttcttcctgccctcgggtgccatatgcttcacctactgcaggatcctgctagctgcccgcaagcaggccgtgcaggtggcctccctcaccaccggcatggccagtcaggcctcggagacgctgcaggtgcccaggaccccacgcccaggggtggagtctgctgacagcaggcgtctagccacgaagcacagcaggaaggccctgaaggccagcctgacgctgggcatcctgctgggcatgttctttgtgacctggttgcccttctttgtggccaacatagtccaggccgtgtgcgactgcatctccccaggcctcttcgatgtcctcacatggctgggttactgtaacagcaccatgaaccccatcatctacccactcttcatgcgggacttcaagcgggcgctgggcaggttcctgccatgtccacgctgtccccgggagcgccaggccagcctggcctcgccatcactgcgcacctctcacagcggcccccggcccggccttagcctacagcaggtgctgccgctgcccctgccgccggactcagattcggactcagacgcaggctcaggcggctcctcgggcctgcggctcacggcccagctgctgcttcctggcgaggccacccaggaccccccgctgcccaccagggccgctgccgccgtcaatttcttcaacatcgaccccgcggagcccgagctgcggccgcatccacttggcatccccacgaactgacccgggcttggggctggccaatggggagctggattgagcagaacccagaccctgagtccttgggccagctcttggctaagaccaggaggctgcaagtctcctagaagccctctgagctccagaggggtgcgcagagctgaccccctgctgccatctccaggccccttacctgcagggatcatagctgactcaga

SEQ ID NO: 20 - protein, 440 aa, Homo sapiens
MVPEPGPTANSTPAWGAGPPSAPGGSGWVAAALCVVIALTAAANSLLIALICTQPALRNTSNFFLVSLFTSDLMVGLVVMPPAMLNALYGRWVLARGLCLLWTAFDVMCCSASILNLCLISLDRYLLILSPLRYKLRMTPLRALALVLGAWSLAALASFLPLLLGWHELGHARPPVPGQCRLLASLPFVLVASGLTFFLPSGAICFTYCRILLAARKQAVQVASLTTGMASQASETLQVPRTPRPGVESADSRRLATKHSRKALKASLTLGILLGMFFVTWLPFFVANIVQAVCDCISPGLFDVLTWLGYCNSTMNPIIYPLFMRDFKRALGRFLPCPRCPRERQASLASPSLRTSHSGPRPGLSLQQVLPLPLPPDSDSDSDAGSGGSSGLRLTAQLLLPGEATQDPPLPTRAAAAVNFFNIDPAEPELRPHPLGIPTN

SEQ ID NO: 21 - DNA, 1385 bp, Homo sapiens
ccatgggcagcggcacacggcggcgcgatgatggacgttaacagcagcggccgcccggacctctacgggcacctccgctctttccttctgccagaagtggggcgcgggctgcccgacttgagccccgacggtggcgccgacccggtcgcgggctcctgggcgccgcacctgctgagcgaggtgacagccagcccggcgcccacctgggacgcgcccccggacaatgcctccggctgtggggaacagatcaactacggcagagtcgagaaagttgtgatcggctccatcctgacgctcatcacgctgctgacgatcgcgggcaactgcctggtggtgatctccgtgtgcttcgtcaagaagctccgccagccctccaactacctgatcgtgtccctggcgctggccgacctctcggtggctgtggcggtcatgcccttcgtcagcgtcaccgacctcatcgggggcaagtggatctttggacactttttctgtaatgtcttcatcgccatggacgtcatgtgctgcacggcctcgatcatgaccctgtgcgtgatcagcattgacaggtaccttgggatcacaaggcccctcacataccctgtgaggcagaatgggaaatgcatggcgaagatgattctctccgtctggcttctctccgcctccatcaccttacctccactctttggatgggctcagaatgtaaatgatgataaggtgtgcttgatcagccaggactttggctatacgatttactctaccgcagtggcattttatatccccatgtccgtcatgcttttcatgtactaccagatttacaaggctgccaggaagagtgctgccaaacacaagtttcctggcttccctcgagtggagccagacagcgtcatcgccctgaatggcatagtgaagctccagaaggaggtggaagagtgtgcaaacctttcgagactcctcaagcatgaaaggaaaaacatctccatctttaagcgagaacagaaagcagccaccaccctggggatcatcgtcggggcctttaccgtgtgctggctgccatttttcctcctctcgacagccagacccttcatctgtggcacttcctgcagctgcatcccactgtgggtggagaggacatttctgtggctaggctatgcaaactctctcattaacccttttatatatgccttcttcaaccgggacctgaggaccacctatcgcagcctgctccagtgccagtaccggaatatcaaccggaagctctcagctgcaggcatgcatgaagccctgaagcttgctgagaggccagagagacctgagtttgtgctacaaaatgctgactactgtagaaaaaaaggtcatgattcatgattgaaagcagaacaatggag

SEQ ID NO: 22 - protein, 445 aa, Homo sapiens
MMDVNSSGRPDLYGHLRSFLLPEVGRGLPDLSPDGGADPVAGSWAPHLLSEVTASPAPTWDAPPDNASGCGEQINYGRVEKVVIGSILTLITLLTIAGNCLVVISVCFVKKLRQPSNYLIVSLALADLSVAVAVMPFVSVTDLIGGKWIFGHFFCNVFIAMDVMCCTASIMTLCVISIDRYLGITRPLTYPVRQNGKCMAKMILSVWLLSASITLPPLFGWAQNVNDDKVCLISQDFGYTIYSTAVAFYIPMSVMLFMYYQIYKAARKSAAKHKFPGFPRVEPDSVIALNGIVKLQKEVEECANLSRLLKHERKNISIFKREQKAATTLGIIVGAFTVCWLPFFLLSTARPFICGTSCSCIPLWVERTFLWLGYANSLINPFIYAFFNRDLRTTYRSLLQCQYRNINRKLSAAGMHEALKLAERPERPEFVLQNADYCRKKGHDS

SEQ ID NO: 23 - DNA, 2900 bp, Homo sapiens
atgagtgtcagaagtgtgaagggtgcctgttctgaatcccagagcctcctctccctctgtgaggctggcaggtgaggaagggtttaacctcactggaaggaatccctggagctagcggctgctgaaggcgtcgaggtgtgggggcacttggacagaacagtcaggcagccgggagctctgccagctttggtgaccttgggccgggctgggagcgctgcggcgggagccggaggactatgagctgccgcgcgttgtccagagcccagcccagccctacgcgcgcggcccggagctctgttccctggaactttgggcactgcctctgggacccctgccggccagcaggcaggatggtgcttgcctcgtgccccttggtgcccgtctgctgatgtgcccagcctgtgcccgccatgccgccctccatctcagctttccaggccgcctacatcggcatcgaggtgctcatcgccctggtctctgtgcccgggaacgtgctggtgatctgggcggtgaaggtgaaccaggcgctgcgggatgccaccttctgcttcatcgtgtcgctggcggtggctgatgtggccgtgggtgccctggtcatccccctcgccatcctcatcaacattgggccacagacctacttccacacctgcctcatggttgcctgtccggtcctcatcctcacccagagctccatcctggccctgctggcaattgctgtggaccgctacctccgggtcaagatccctctccggtacaagatggtggtgaccccccggagggcggcggtggccatagccggctgctggatcctctccttcgtggtgggactgacccctatgtttggctggaacaatctgagtgcggtggagcgggcctgggcagccaacggcagcatgggggagcccgtgatcaagtgcgagttcgagaaggtcatcagcatggagtacatggtctacttcaacttctttgtgtgggtgctgcccccgcttctcctcatggtcctcatctacctggaggtcttctacctaatccgcaagcagctcaacaagaaggtgtcggcctcctccggcgacccgcagaagtactatgggaaggagctgaagatcgccaagtcgctggccctcatcctcttcctctttgccctcagctggctgcctttgcacatcctcaactgcatcaccctcttctgcccgtcctgccacaagcccagcatccttacctacattgccatcttcctcacgcacggcaactcggccatgaaccccattgtctatgccttccgcatccagaagttccgcgtcaccttccttaagatttggaatgaccatttccgctgccagcctgcacctcccattgacgaggatctcccagaagagaggcctgatgactagaccccgccttccgctcccaccagcccacatccagtggggtctcagtccagtcctcacatgcccgctgtcccaggggtctccctgagcctgccccagctgggctgttggctgggggcatgggggaggctctgaagagatacccacagagtgtggtccctccactaggagttaactaccctacacctctgggccctgcaggaggcctgggagggcaagggtcctacggagggaccaggtgtctagaggcaacagtgttctgagcccccacctgcctgaccatcccatgagcagtccagcgcttcagggctgggcaggtcctggggaggctgagactgcagaggagccacctgggctgggagaaggtgcttgggcttctgcggtgaggcaggggagtctgcttgtcttagatgttggtggtgcagccccaggaccaagcttaaggagaggagagcatctgctctgagacggatggaaggagagaggttgaggatgcactggcctgttctgtaggagagactggccagaggcagctaaggggcaggaatcaaggagcctccgttcccacctctgaggactctggaccccaggccataccaggtgctagggtgcctgctctccttgccctgggccagcccaggattgtacgtgggagaggcagaaagggtaggttcagtaatcatttctgatgatttgctggagtgctggctccacgccctggggagtgagcttggtgcggtaggtgctggcctcaaacagccacgaggtggtagctctgagccctccttcttgccctgagctttccggggaggagcctggagtgtaattacctgtcatctgggccaccagctccactggcccccgttgccgggcctggactgtcctaggtgaccccatctctgctgcttctgggcctgatggagaggagaacactagacatgccaactcgggagcattctgcctgcctgggaacggggtggacgagggagtgtctgtaaggactcagtgttgactgtaggcgcccctggggtgggtttagcaggctgcagcaggcagaggaggagtacccccctgagagcatgtgggggaaggccttgctgtcatgtgaatccctcaatacccctagtatctggctgggttttcaggggctttggaagctctgttgcaggtgtccgggggtctaggactttagggatctgggatctggggaaggaccaacccatgccctgccaagcctggagcccctgtgttggggggcaaggtgggggagcctggagcccctgtgtgggagggcgaggcgggggagcctggagcccctgtgtgggagggcgaggcgggggatcctggagcccctgtgtcggggggcgagggaggggaggtggccgtcggttgaccttctgaacatgagtgtcaactccaggacttgcttccaagcccttccctctgttggaaattgggtgtgccctggctcccaagggaggcccatgtgactaataaaaaactgtgaaccct

SEQ ID NO: 24 - protein, 326 aa, Homo sapiens
MPPSISAFQAAYIGIEVLIALVSVPGNVLVIWAVKVNQALRDATFCFIVSLAVADVAVGALVIPLAILINIGPQTYFHTCLMVACPVLILTQSSILALLAIAVDRYLRVKIPLRYKMVVTPRRAAVAIAGCWILSFVVGLTPMFGWNNLSAVERAWAANGSMGEPVIKCEFEKVISMEYMVYFNFFVWVLPPLLLMVLIYLEVFYLIRKQLNKKVSASSGDPQKYYGKELKIAKSLALILFLFALSWLPLHILNCITLFCPSCHKPSILTYIAIFLTHGNSAMNPIVYAFRIQKFRVTFLKIWNDHFRCQPAPPIDEDLPEERPDD

SEQ ID NO: 25 - DNA, 2403 bp, Homo sapiens
tttgcaggtgcctcaggaaccctgaagctgggctgagccatgatgctgctgccagaacccctgcagagggcctggtttcaggagactcagagtcctctgtgaaaaagcccttggagagcgccccagcagggctgcacttggctcctgtgaggaaggggctcaggggtctgggcccctccgcctgggccgggctgggagccaggcgggcggctgggctgcagcaatggaccgtgagctggcccagcccgcgtccgtgctgagcctgcctgtcgtctgtggccatgcccatcatgggctcctcggtgtacatcacggtggagctggccattgctgtgctggccatcctgggcaatgtgctggtgtgctgggccgtgtggctcaacagcaacctgcagaacgtcaccaactactttgtggtgtcactggcggcggccgacatcgcagtgggtgtgctcgccatcccctttgccatcaccatcagcaccgggttctgcgctgcctgccacggctgcctcttcattgcctgcttcgtcctggtcctcacgcagagctccatcttcagtctcctggccatcgccattgaccgctacattgccatccgcatcccgctccggtacaatggcttggtgaccggcacgagggctaagggcatcattgccatctgctgggtgctgtcgtttgccatcggcctgactcccatgctaggttggaacaactgcggtcagccaaaggagggcaagaaccactcccagggctgcggggagggccaagtggcctgtctctttgaggatgtggtccccatgaactacatggtgtacttcaacttctttgcctgtgtgctggtgcccctgctgctcatgctgggtgtctatttgcggatcttcctggcggcgcgacgacagctgaagcagatggagagccagcctctgccgggggagcgggcacggtccacactgcagaaggaggtccatgctgccaagtcactggccatcattgtggggctctttgccctctgctggctgcccctacacatcatcaactgcttcactttcttctgccccgactgcagccacgcccctctctggctcatgtacctggccatcgtcctctcccacaccaattcggttgtgaatcccttcatctacgcctaccgtatccgcgagttccgccagaccttccgcaagatcattcgcagccacgtcctgaggcagcaagaacctttcaaggcagctggcaccagtgcccgggtcttggcagctcatggcagtgacggagagcaggtcagcctccgtctcaacggccacccgccaggagtgtgggccaacggcagtgctccccaccctgagcggaggcccaatggctatgccctggggctggtgagtggagggagtgcccaagagtcccaggggaacacgggcctcccagacgtggagctccttagccatgagctcaagggagtgtgcccagagccccctggcctagatgaccccctggcccaggatggagcaggagtgtcctgatgattcatggagtttgccccttcctaagggaaggagatctttatctttctggttggcttgaccagtcacgttgggagaagagagagagtgccaggagaccctgagggcagccggttcctactttggactgagagaagggagccccaggctggagcagcatgaggcccagcaagaagggcttgggttctgaggaagcagatgtttcatgctgtgaggccttgcaccaggtgggggccacagcaccagcagcatctttgctgggcaggcccagccctccactgcagaagcatctggaagcaccaccttgtctccacagagcagcttgggcacagcagactggcctggccctgagactggggagtggctccaatagcctcctgccacccacacaccactctccctagactctcctagggttcaggagctgctgggcccagaggtgacatttgacttttttccaggaaaaatgtaagtgtgaggaaaccctttttattttattacctttcactctctggctgctgggtctgccgtcggtcctgctgctaacctggcaccagagcctctgcccggggagcctcaggcagtcctctcctgctgtcacagctgccatccacttctcagtcccagggccatctcttggagtgacaaagctgggatcaaggatagggagttgtaacagagcagtgccagagcatgggcccaggtcccaggggagaggttggggctggcaggccactggcatgtgctgagtagcgcagagctacccagtgagaggccttgtctaactgcctttccttctaaagggaatgtttttttctgagataaaataaaaacgagccacatcgtgttttaagcttgtccaaatgaaaaaaaaaaaaaaaaa

SEQ ID NO: 26 - protein, 412 aa, Homo sapiens
MPIMGSSVYITVELAIAVLAILGNVLVCWAVWLNSNLQNVTNYFVVSLAAADIAVGVLAIPFAITISTGFCAACHGCLFIACFVLVLTQSSIFSLLAIAIDRYIAIRIPLRYNGLVTGTRAKGIIAICWVLSFAIGLTPMLGWNNCGQPKEGKNHSQGCGEGQVACLFEDVVPMNYMVYFNFFACVLVPLLLMLGVYLRIFLAARRQLKQMESQPLPGERARSTLQKEVHAAKSLAIIVGLFALCWLPLHIINCFTFFCPDCSHAPLWLMYLAIVLSHTNSVVNPFIYAYRIREFRQTFRKIIRSHVLRQQEPFKAAGTSARVLAAHGSDGEQVSLRLNGHPPGVWANGSAPHPERRPNGYALGLVSGGSAQESQGNTGLPDVELLSHELKGVCPEPPGLDDPLAQDGAGVS

SEQ ID NO: 27 - DNA, 1733 bp, Homo sapiens
gggcaatttgttagttatccgccgccaccaagacgcggcacggcgcctggaccggaggggccccgcgcgggcgcgaactttgggctcgggcgagtgggtggtgctccgcccagcccgagacgggcgggcgcgcgggccaatgggtgccgcctcttggccgcggggggccccgacccgtgggtcccggccaccagcgccccagccccgaggctcagaagcggcaggcggaggcgcggtccgggcgctatggccatgcccggcgggtctcacgcggctgcccctcgcccggcgcgccttcggtagggggcgcccggggcccagctggcccggccatgctgctggagacacaggacgcgctgtacgtggcgctggagctggtcatcgccgcgctttcggtggcgggcaacgtgctggtgtgcgccgcggtgggcacggcgaacactctgcagacgcccaccaactacttcctggtgtccctggctgcggccgacgtggccgtggggctcttcgccatcccctttgccatcaccatcagcctgggcttctgcactgacttctacggctgcctcttcctcgcctgcttcgtgctggtgctcacgcagagctccatcttcagccttctggccgtggcagtcgacagatacctggccatctgtgtcccgctcaggtataaaagtttggtcacggggacccgagcaagaggggtcattgctgtcctctgggtccttgcctttggcatcggattgactccattcctggggtggaacagtaaagacagtgccaccaacaactgcacagaaccctgggatggaaccacgaatgaaagctgctgccttgtgaagtgtctctttgagaatgtggtccccatgagctacatggtatatttcaatttctttgggtgtgttctgcccccactgcttataatgctggtgatctacattaagatcttcctggtggcctgcaggcagcttcagcgcactgagctgatggaccactcgaggaccaccctccagcgggagatccatgcagccaagtcactggccatgattgtggggatttttgccctgtgctggttacctgtgcatgctgttaactgtgtcactcttttccagccagctcagggtaaaaataagcccaagtgggcaatgaatatggccattcttctgtcacatgccaattcagttgtcaatcccattgtctatgcttaccggaaccgagacttccgctacacttttcacaaaattatctccaggtatcttctctgccaagcagatgtcaagagtgggaatggtcaggctggggtacagcctgctctcggtgtgggcctatgatctaggctctcgcctcttccaggagaagatacaaatccacaagaaacaaagaggacacggctggttttcattgtgaaagatagctacacctcacaaggaaatggactgcctctcttgagcacttccctggagctaccacgtatctagctaatatgtatgtgtcagtagtaggctccaaggattgacaaatatatttatgatctattcagctgcttttactgtgtggattatgccaacagcttgaatggattctaacagactcttttgtttttaaaagtctgccttgtttatggtggaaaattactgaaactattttactgtgaaacagtgtgaactattataatgcaaatactttttaacttagaggcaatggaaaaataaaagttgactgtactaaaaatg

SEQ ID NO: 28 - protein, 332 aa, Homo sapiens
MLLETQDALYVALELVIAALSVAGNVLVCAAVGTANTLQTPTNYFLVSLAAADVAVGLFAIPFAITISLGFCTDFYGCLFLACFVLVLTQSSIFSLLAVAVDRYLAICVPLRYKSLVTGTRARGVIAVLWVLAFGIGLTPFLGWNSKDSATNNCTEPWDGTTNESCCLVKCLFENVVPMSYMVYFNFFGCVLPPLLIMLVIYIKIFLVACRQLQRTELMDHSRTTLQREIHAAKSLAMIVGIFALCWLPVHAVNCVTLFQPAQGKNKPKWAMNMAILLSHANSVVNPIVYAYRNRDFRYTFHKIISRYLLCQADVKSGNGQAGVQPALGVGL

SEQ ID NO: 29 - DNA, 2241 bp, Homo sapiens
atctttgctgcaaaggctgggtatcggctgtgctcagcaaagcgtcaactcgtgcaagaacttagcaggaatagttctggctaaggttaggaggctgccaccaaagtctcttttttgttcctctgcttctcccgtttgcctccttatcatgagatctttttgctaagctggcagaaagattgcatagtcagtgcttccagctctgctcccacctgatcctgcactgtcctctggtccctgaatgaatgaactctgatacccaatcttgtctcgagccttctctatgccactcatggctcctcttctgctctttccatctttttgctgagagttctgagctctgtacttcctcttggcccatctcacttcctgaaacacccctgaagagggttgcttatcttgatggaactcaaaaagccaaaaagctgcaggcagaggcgttgaggacatctgtttggggaactaagagcagcagcactttcagattcagtccatatagagctgtcctacagcattctggaaacttgaggatgtgcggtgcataaaggggctggaagtgacccacctgtgatgagccctttctaaggagaagggtttccaagagatcaccccaccagaaaagggtaggaatgagcaagttgggaattttagactgtcactgcacatggacctctgggaagacgtctggcgagagctaggcccactggccctacagacggatcttgctggctcacctgtccctgtggaggttcccctgggaaggcaagatgcccaacaacagcactgctctgtcattggccaatgttacctacatcaccatggaaattttcattggactctgcgccatagtgggcaacgtgctggtcatctgcgtggtcaagctgaaccccagcctgcagaccaccaccttctatttcattgtctctctagccctggctgacattgctgttggggtgctggtcatgcctttggccattgttgtcagcctgggcatcacaatccacttctacagctgcctttttatgacttgcctactgcttatctttacccacgcctccatcatgtccttgctggccatcgctgtggaccgatacttgcgggtcaagcttaccgtcagatacaagagggtcaccactcacagaagaatatggctggccctgggcctttgctggctggtgtcattcctggtgggattgacccccatgtttggctggaacatgaaactgacctcagagtaccacagaaatgtcaccttcctttcatgccaatttgtttccgtcatgagaatggactacatggtatacttcagcttcctcacctggattttcatccccctggttgtcatgtgcgccatctatcttgacatcttttacatcattcggaacaaactcagtctgaacttatctaactccaaagagacaggtgcattttatggacgggagttcaagacggctaagtccttgtttctggttcttttcttgtttgctctgtcatggctgcctttatctatcatcaactgcatcatctactttaatggtgaggtaccacagcttgtgctgtacatgggcatcctgctgtcccatgccaactccatgatgaaccctatcgtctatgcctataaaataaagaagttcaaggaaacctaccttttgatcctcaaagcctgtgtggtctgccatccctctgattctttggacacaagcattgagaagaattctgagtagttatccatcagagatgactctgtctcattgaccttcagattccccatcaacaaacacttgagggcctgtatgcctgggccaagggatttttacatccttgattacttccactgaggtgggagcatctccagtgctccccaattatatctcccccactccactactctcttcctccacttcatttttcctttgtcctttctctctaattcagtgttttggaggcctgacttggggacaacgtattattgatattattgtctgttttccttcttcccaatagaagaataagtcatggagcctgaagggtgcctagttgacttactgacaaaaggctctagttgggctgaacatgtgtgtggtggtgactcatttccatgccattgtggaattgagcagagaacctgctctcggaggatgcctagaagatgttgggaacagaagaaataaactgagtttaagggggacttaaactgctgaattcacctgtggatgtttttgagtaaataaaagctaatag

SEQ ID NO: 30 - protein, 318 aa, Homo sapiens
MPNNSTALSLANVTYITMEIFIGLCAIVGNVLVICVVKLNPSLQTTTFYFIVSLALADIAVGVLVMPLAIVVSLGITIHFYSCLFMTCLLLIFTHASIMSLLAIAVDRYLRVKLTVRYKRVTTHRRIWLALGLCWLVSFLVGLTPMFGWNMKLTSEYHRNVTFLSCQFVSVMRMDYMVYFSFLTWIFIPLVVMCAIYLDIFYIIRNKLSLNLSNSKETGAFYGREFKTAKSLFLVLFLFALSWLPLSIINCIIYFNGEVPQLVLYMGILLSHANSMMNPIVYAYKIKKFKETYLLILKACVVCHPSDSLDTSIEKNSE

SEQ ID NO: 31 - DNA, 894 bp, Homo sapiens
atgaagcacattatcaactcgtatgaaaacatcaacaacacagcaagaaataattccgactgtcctcgtgtggttttgccggaggagatatttttcacaatttccattgttggagttttggagaatctgatcgtcctgctggctgtgttcaagaataagaatctccaggcacccatgtactttttcatctgtagcttggccatatctgatatgctgggcagcctatataagatcttggaaaatatcctgatcatattgagaaacatgggctatctcaagccacgtggcagttttgaaaccacagccgatgacatcatcgactccctgtttgtcctctccctgcttggctccatcttcagcctgtctgtgattgctgcggaccgctacatcaccatcttccacgcactgcggtaccacagcatcgtgaccatgcgccgcactgtggtggtgcttacggtcatctggacgttctgcacggggactggcatcaccatggtgatcttctcccatcatgtgcccacagtgatcaccttcacgtcgctgttcccgctgatgctggtcttcatcctgtgcctctatgtgcacatgttcctgctggctcgatcccacaccaggaagatctccaccctccccagagccaacatgaaaggggccatcacactgaccatcctgctcggggtcttcatcttctgctgggccccctttgtgcttcatgtcctcttgatgacattctgcccaagtaacccctactgcgcctgctacatgtctctcttccaggtgaacggcatgttgatcatgtgcaatgccgtcattgaccccttcatatatgccttccggagcccagagctcagggacgcattcaaaaagatgatcttctgcagcaggtactggtag

SEQ ID NO: 32 - protein, 297 aa, Homo sapiens
MKHIINSYENINNTARNNSDCPRVVLPEEIFFTISIVGVLENLIVLLAVFKNKNLQAPMYFFICSLAISDMLGSLYKILENILIILRNMGYLKPRGSFETTADDIIDSLFVLSLLGSIFSLSVIAADRYITIFHALRYHSIVTMRRTVVVLTVIWTFCTGTGITMVIFSHHVPTVITFTSLFPLMLVFILCLYVHMFLLARSHTRKISTLPRANMKGAITLTILLGVFIFCWAPFVLHVLLMTFCPSNPYCACYMSLFQVNGMLIMCNAVIDPFIYAFRSPELRDAFKKMIFCSRYW

SEQ ID NO: 33 - DNA, 2130 bp, Homo sapiens
tcctgccggccgctcgttctgtgcccccggcccggccaccgacggccgcgcgttgagatgactttccgcgatctcctgagcgtcagtttcgagggaccccgcccggacagcagcgcagggggctccagcgcgggcggcggcgggggcagcgcgggcggcgcggccccctcggagggcccggcggtgggcggcgtgccggggggcgcgggcggcggcggcggcgtggtgggcgcaggcagcggcgaggacaaccggagctccgcgggggagccggggagcgcgggcgcgggcggcgacgtgaatggcacggcggccgtcgggggactggtggtgagcgcgcagggcgtgggcgtgggcgtcttcctggcagccttcatccttatggccgtggcaggtaacctgcttgtcatcctctcagtggcctgcaaccgccacctgcagaccgtcaccaactatttcatcgtgaacctggccgtggccgacctgctgctgagcgccaccgtactgcccttctcggccaccatggaggttctgggcttctgggcctttggccgcgccttctgcgacgtatgggccgccgtggacgtgctgtgctgcacggcctccatcctcagcctctgcaccatctccgtggaccggtacgtgggcgtgcgccactcactcaagtacccagccatcatgaccgagcgcaaggcggccgccatcctggccctgctctgggtcgtagccctggtggtgtccgtagggcccctgctgggctggaaggagcccgtgccccctgacgagcgcttctgcggtatcaccgaggaggcgggctacgctgtcttctcctccgtgtgctccttctacctgcccatggcggtcatcgtggtcatgtactgccgcgtgtacgtggtcgcgcgcagcaccacgcgcagcctcgaggcaggcgtcaagcgcgagcgaggcaaggcctccgaggtggtgctgcgcatccactgtcgcggcgcggccacgggcgccgacggggcgcacggcatgcgcagcgccaagggccacaccttccgcagctcgctctccgtgcgcctgctcaagttctcccgtgagaagaaagcggccaagactctggccatcgtcgtgggtgtcttcgtgctctgctggttccctttcttctttgtcctgccgctcggctccttgttcccgcagctgaagccatcggagggcgtcttcaaggtcatcttctggctcggctacttcaacagctgcgtgaacccgctcatctacccctgttccagccgcgagttcaagcgcgccttcctccgtctcctgcgctgccagtgccgtcgtcgccggcgccgccgccctctctggcgtgtctacggccaccactggcgggcctccaccagcggcctgcgccaggactgcgccccgagttcgggcgacgcgccccccggagcgccgctggccctcaccgcgctccccgaccccgaccccgaacccccaggcacgcccgagatgcaggctccggtcgccagccgtcgaaagccacccagcgccttccgcgagtggaggctgctggggccgttccggagacccacgacccagctgcgcgccaaagtctccagcctgtcgcacaagatccgcgccgggggcgcgcagcgcgcagaggcagcgtgcgcccagcgctcagaggtggaggctgtgtccctaggcgtcccacacgaggtggccgagggcgccacctgccaggcctacgaattggccgactacagcaacctacgggagaccgatatttaaggaccccagagctaggccgcggagtgtgctgggcttgggggtaagggggaccagagaggcgggctggtgttctaagagcccccgtgcaaatcggagacccggaaactgatcagggcagctgctctgtgacatccctgaggaactgggcagagcttgaggctggagcccttgaaaggtgaaaagtagtggggccccctgctggactcaggtgcccagaactcttttcttagaagggagaggctgcgggctccgtggggccttttgctcccaatccctatttgagaaacactgccccatcctccatgccctgaaccctgagtagacagccccaagcatggccaggaaggcctgccc

SEQ ID NO: 34 - protein, 572 aa, Homo sapiens
MTFRDLLSVSFEGPRPDSSAGGSSAGGGGGSAGGAAPSEGPAVGGVPGGAGGGGGVVGAGSGEDNRSSAGEPGSAGAGGDVNGTAAVGGLVVSAQGVGVGVFLAAFILMAVAGNLLVILSVACNRHLQTVTNYFIVNLAVADLLLSATVLPFSATMEVLGFWAFGRAFCDVWAAVDVLCCTASILSLCTISVDRYVGVRHSLKYPAIMTERKAAAILALLWVVALVVSVGPLLGWKEPVPPDERFCGITEEAGYAVFSSVCSFYLPMAVIVVMYCRVYVVARSTTRSLEAGVKRERGKASEVVLRIHCRGAATGADGAHGMRSAKGHTFRSSLSVRLLKFSREKKAAKTLAIVVGVFVLCWFPFFFVLPLGSLFPQLKPSEGVFKVIFWLGYFNSCVNPLIYPCSSREFKRAFLRLLRCQCRRRRRRRPLWRVYGHHWRASTSGLRQDCAPSSGDAPPGAPLALTALPDPDPEPPGTPEMQAPVASRRKPPSAFREWRLLGPFRRPTTQLRAKVSSLSHKIRAGGAQRAEAACAQRSEVEAVSLGVPHEVAEGATCQAYELADYSNLRETDI

SEQ ID NO: 35 - DNA, 1786 bp, Homo sapiens
aggcaggagacgtgctgcgggctgggctgcccgggggagatgactcctgccaggagggcgcctctgggaagaagaccacgggggaagcaaagtttcagggcagctgaggagccttcgccgcagcccttccgagcccaatcatcccccaggctatggagggcggactctaagatgaatcccgacctggacaccggccacaacacatcagcacctgcccactggggagagttgaaaaatgccaacttcactggccccaaccagacctcgagcaactccacactgccccagctggacatcaccagggccatctctgtgggcctggtgctgggcgccttcatcctctttgccatcgtgggcaacatcctagtcatcttgtctgtggcctgcaaccggcacctgcggacgcccaccaactacttcattgtcaacctggccatggccgacctgctgttgagcttcaccgtcctgcccttctcagcggccctagaggtgctcggctactgggtgctggggcggatcttctgtgacatctgggcagccgtggatgtcctgtgctgcacagcgtccattctgagcctgtgcgccatctccatcgatcgctacatcggggtgcgctactctctgcagtatcccacgctggtcacccggaggaaggccatcttggcgctgctcagtgtctgggtcttgtccaccgtcatctccatcgggcctctccttgggtggaaggagccggcacccaacgatgacaaggagtgcggggtcaccgaagaacccttctatgccctcttctcctctctgggctccttctacatccctctggcggtcattctagtcatgtactgccgtgtctatatagtggccaagagaaccaccaagaacctagaggcaggagtcatgaaggagatgtccaactccaaggagctgaccctgaggatccattccaagaactttcacgaggacacccttagcagtaccaaggccaagggccacaaccccaggagttccatagctgtcaaactttttaagttctccagggaaaagaaagcagctaagacgttgggcattgtggtcggtatgttcatcttgtgctggctacccttcttcatcgctctaccgcttggctccttgttctccaccctgaagccccccgacgccgtgttcaaggtggtgttctggctgggctacttcaacagctgcctcaaccccatcatctacccatgctccagcaaggagttcaagcgcgctttcgtgcgcatcctcgggtgccagtgccgcggccgcggccgccgccgacgccgccgccgccgtcgcctgggcggctgcgcctacacctaccggccgtggacgcgcggcggctcgctggagcgctcgcagtcgcgcaaggactcgctggacgacagcggcagctgcctgagcggcagccagcggaccctgccctcggcctcgccgagcccgggctacctgggccgcggcgcgccaccgccagtcgagctgtgcgccttccccgagtggaaggcgcccggcgccctcctgagcctgcccgcgcctgagccccccggccgccgcggccgccacgactcgggcccgctcttcaccttcaagctcctgaccgagcccgagagccccgggaccgacggcggcgccagcaacggaggctgcgaggccgcggccgacgtggccaacgggcagccgggcttcaaaagcaacatgcccctggcgcccgggcagttttagggcccccgtgcgcagctttctttccctggggaggaaaacatcgtggggggga

SEQ ID NO: 36 - protein, 520 aa, Homo sapiens
MNPDLDTGHNTSAPAHWGELKNANFTGPNQTSSNSTLPQLDITRAISVGLVLGAFILFAIVGNILVILSVACNRHLRTPTNYFIVNLAMADLLLSFTVLPFSAALEVLGYWVLGRIFCDIWAAVDVLCCTASILSLCAISIDRYIGVRYSLQYPTLVTRRKAILALLSVWVLSTVISIGPLLGWKEPAPNDDKECGVTEEPFYALFSSLGSFYIPLAVILVMYCRVYIVAKRTTKNLEAGVMKEMSNSKELTLRIHSKNFHEDTLSSTKAKGHNPRSSIAVKLFKFSREKKAAKTLGIVVGMFILCWLPFFIALPLGSLFSTLKPPDAVFKVVFWLGYFNSCLNPIIYPCSSKEFKRAFVRILGCQCRGRGRRRRRRRRRLGGCAYTYRPWTRGGSLERSQSRKDSLDDSGSCLSGSQRTLPSASPSPGYLGRGAPPPVELCAFPEWKAPGALLSLPAPEPPGRRGRHDSGPLFTFKLLTEPESPGTDGGASNGGCEAAADVANGQPGFKSNMPLAPGQF

SEQ ID NO: 37 - DNA, 2290 bp, Homo sapiens
gaattccgaatcatgtgcagaatgctgaatcttcccccagccaggacgaataagacagcgcggaaaagcagattctcgtaattctggaattgcatgttgcaaggagtctcctggatcttcgcacccagcttcgggtagggagggagtccgggtcccgggctaggccagcccggcaggtggagagggtccccggcagccccgcgcgcccctggccatgtctttaatgccctgccccttcatgtggccttctgagggttcccagggctggccagggttgtttcccacccgcgcgcgcgctctcacccccagccaaacccacctggcagggctccctccagccgagaccttttgattcccggctcccgcgctcccgcctccgcgccagcccgggaggtggccctggacagccggacctcgcccggccccggctgggaccatggtgtttctctcgggaaatgcttccgacagctccaactgcacccaaccgccggcaccggtgaacatttccaaggccattctgctcggggtgatcttggggggcctcattcttttcggggtgctgggtaacatcctagtgatcctctccgtagcctgtcaccgacacctgcactcagtcacgcactactacatcgtcaacctggcggtggccgacctcctgctcacctccacggtgctgcccttctccgccatcttcgaggtcctaggctactgggccttcggcagggtcttctgcaacatctgggcggcagtggatgtgctgtgctgcaccgcgtccatcatgggcctctgcatcatctccatcgaccgctacatcggcgtgagctacccgctgcgctacccaaccatcgtcacccagaggaggggtctcatggctctgctctgcgtctgggcactctccctggtcatatccattggacccctgttcggctggaggcagccggcccccgaggacgagaccatctgccagatcaacgaggagccgggctacgtgctcttctcagcgctgggctccttctacctgcctctggccatcatcctggtcatgtactgccgcgtctacgtggtggccaagagggagagccggggcctcaagtctggcctcaagaccgacaagtcggactcggagcaagtgacgctccgcatccatcggaaaaacgccccggcaggaggcagcgggatggccagcgccaagaccaagacgcacttctcagtgaggctcctcaagttctcccgggagaagaaagcggccaaaacgctgggcatcgtggtcggctgcttcgtcctctgctggctgccttttttcttagtcatgcccattgggtctttcttccctgatttcaagccctctgaaacagtttttaaaatagtattttggctcggatatctaaacagctgcatcaaccccatcatatacccatgctccagccaagagttcaaaaaggcctttcagaatgtcttgagaatccagtgtctccgcagaaagcagtcttccaaacatgccctgggctacaccctgcacccgcccagccaggccgtggaagggcaacacaaggacatggtgcgcatccccgtgggatcaagagagaccttctacaggatctccaagacggatggcgtttgtgaatggaaatttttctcttccatgccccgtggatctgccaggattacagtgtccaaagaccaatcctcctgtaccacagcccgggtgagaagtaaaagctttttggaggtctgctgctgtgtagggccctcaacccccagccttgacaagaaccatcaagttccaaccattaaggtccacaccatctccctcagtgagaacggggaggaagtctaggacaggaaagatgcagaggaaaggggaataatcttaggtacccaccccacttccttctcggaaggccagctcttcttggaggacaagacaggaccaatcaaagaggggacctgctgggaatggggtgggtggtagacccaactcatcaggcagcgggtagggcacagggaagagggagggtgtctcacaaccaaccagttcagaatgatacggaacagcatttccctgcagctaatgctttcttggtcactctgtgcccacttcaacgaaaaccaccatgggaaacagaatttcatgcacaatccaaaagactataaatataggattatgatttcatcatgaatattttgagcacacactctaagtttggagctatttcttgatggaagtgaggggattttattttcaggctcaacctactgacagccacatttgacatttatgccggaattc

SEQ ID NO: 38 - protein, 466 aa, Homo sapiens
MVFLSGNASDSSNCTQPPAPVNISKAILLGVILGGLILFGVLGNILVILSVACHRHLHSVTHYYIVNLAVADLLLTSTVLPFSAIFEVLGYWAFGRVFCNIWAAVDVLCCTASIMGLCIISIDRYIGVSYPLRYPTIVTQRRGLMALLCVWALSLVISIGPLFGWRQPAPEDETICQINEEPGYVLFSALGSFYLPLAIILVMYCRVYVVAKRESRGLKSGLKTDKSDSEQVTLRIHRKNAPAGGSGMASAKTKTHFSVRLLKFSREKKAAKTLGIVVGCFVLCWLPFFLVMPIGSFFPDFKPSETVFKIVFWLGYLNSCINPIIYPCSSQEFKKAFQNVLRIQCLRRKQSSKHALGYTLHPPSQAVEGQHKDMVRIPVGSRETFYRISKTDGVCEWKFFSSMPRGSARITVSKDQSSCTTARVRSKSFLEVCCCVGPSTPSLDKNHQVPTIKVHTISLSENGEEV

SEQ ID NO: 39 - DNA, 3653 bp, Homo sapiens
gcgctcggcgcccaccaggcggacgcccaggagaacccctgcctccgtcgcggctcctggagagctgatcgttcacctgccccggcccgcctgaggacgggggtgccttcatgcggcccccacactcctcaccccgccgccgccgccgtccccgagctccgcacagtgcgccccagccccagcagggcgcacaactttggaagtctcgcggcgctccgagaggcggcagagtccgcgccccagccccgggccgggccgggccagaaccgcagcgtctgggggaagccagagagtcggtaatcgcttcggggatgtaaggcgacagacataggacccccgagctcgcatcagcacccttcggctgcctcccggggtgggggcgggccccgcacacggtaagacctcttgctttcgctcaggctcaagattcaagatacagatattgatatgtatatatatatttaatttcctgtcatccttccaagttatcaggccaccgatgatttttgttctcccttcttgaagaataaatctctctttacccatcggctctccctactctctcccgccgcttagaaataaaacttggctgtattaggagctcggagcaagaaggcgcccaccgagagcgtctgaagcgcgagccaggcgcagttcgcgggacccgggccatgggccgctagcggtcctccagttcgggcccggcctccctgcggccccctccctatgtgagccgcagccaggcgagcggggcgccggaggaagaggaggacccacgggcgccgggccggaaggcagctggcagcaggcccaggccagcgggcgcccgcgttcatgttccgccaggagcagccgttggccgagggcagctttgcgcccatgggctccctgcagccggacgcgggcaacgcgagctggaacgggaccgaggcgccggggggcggcgcccgggccaccccttactccctgcaggtgacgctgacgctggtgtgcctggccggcctgctcatgctgctcaccgtgttcggcaacgtgctcgtcatcatcgccgtgttcacgagccgcgcgctcaaggcgccccaaaacctcttcctggtgtctctggcctcggccgacatcctggtggccacgctcgtcatccctttctcgctggccaacgaggtcatgggctactggtacttcggcaaggcttggtgcgagatctacctggcgctcgacgtgctcttctgcacgtcgtccatcgtgcacctgtgcgccatcagcctggaccgctactggtccatcacacaggccatcgagtacaacctgaagcgcacgccgcgccgcatcaaggccatcatcatcaccgtgtgggtcatctcggccgtcatctccttcccgccgctcatctccatcgagaagaagggcggcggcggcggcccgcagccggccgagccgcgctgcgagatcaacgaccagaagtggtacgtcatctcgtcgtgcatcggctccttcttcgctccctgcctcatcatgatcctggtctacgtgcgcatctaccagatcgccaagcgtcgcacccgcgtgccacccagccgccggggtccggacgccgtcgccgcgccgccggggggcaccgagcgcaggcccaacggtctgggccccgagcgcagcgcgggcccggggggcgcagaggccgaaccgctgcccacccagctcaacggcgcccctggcgagcccgcgccggccgggccgcgcgacaccgacgcgctggacctggaggagagctcgtcttccgaccacgccgagcggcctccagggccccgcagacccgagcgcggtccccggggcaaaggcaaggcccgagcgagccaggtgaagccgggcgacagcctgccgcggcgcgggccgggggcgacggggatcgggacgccggctgcagggccgggggaggagcgcgtcggggctgccaaggcgtcgcgctggcgcgggcggcagaaccgcgagaagcgcttcacgttcgtgctggccgtggtcatcggagtgttcgtggtgtgctggttccccttcttcttcacctacacgctcacggccgtcgggtgctccgtgccacgcacgctcttcaaattcttcttctggttcggctactgcaacagctcgttgaacccggtcatctacaccatcttcaaccacgatttccgccgcgccttcaagaagatcctctgtcggggggacaggaagcggatcgtgtgaggtttccgctggcgcccgcgtagactcacgctgactgcaggcagcggggggcatcgaggggtgcttagccccagggcactcagaaacccgggcgctgcctgctctgcgtttcctcgtctggggtggctctgcagcctcctgcgggcgggcgtctgctgctcctacaagggaagcttcttgctgccaggcccacacatccccagttgttggtttggccactcttgacctggagccatcttcctagtgggccacccctaatcactattgcttcctaaaggtattttcaccctcttcgcctggtacagccctcacagctcttcagagcaagcactggactacaagggcatggctcacaaaaggttaatggatgggggttacctagccctggctaattccccttccattcccaactctctctctctttttgaagaaaaatgctaagggcagccctgcctgccctccccatcccccgctgtaaatatacactatttttgatagcacacatggggcccccatatctcttggccttggttttgatgttgaaatcctggccttgggagagatgccttccaggcagacacagctgtctggttcaggccaagcccctttgcaatgcaagccctttctggtgttatgaagtccctctatgtcgtcgttttcaccagcaactggtgactgtcccttcgacacggacctgctttgagatttcctgacagggaaaagatttctgtccatttttttcctgtgcctaacagcataattgccttttcctatgtaaatattatgatggtggatcaagacataagtaaatgagcctttctgcctcacatcagccctgtgtataaagccattattctctgatgcactgtttgccccagtaactcactttaaaacctctctttccagtgttccctctctccctccagggccactgcttgaagaagaatatgtatgtttctatcttgtatgtctgtgtgcccctcctgccccgaaagtgctgactatggggaaatcttttagctgctgtttttagactccaaggagtggaaattatgtggaagaagcaaacctgatacaatttgcccaaggtaaacagtttgaaaagacaaatgggcctgccaaactgtacagtttcttccccaagagctgttaggtatcaaaatgttgtcctttcccccctccgtgcttttctggttgagatcatgtcattgatgaactgccaaagtcaggggaggagggcagagactttgtgtttacatctgcatttctacatgttttagacagagacaatttaaggcctgcactcttatttcactaaagaaaaactaatgtcagcacatgttgctaatgacagtggatttttttttaaataaaaaagtttacagatcaaatgtgaaataaatatgaatggagtggtcaaa

SEQ ID NO: 40 - protein, 450 aa, Homo sapiens
MGSLQPDAGNASWNGTEAPGGGARATPYSLQVTLTLVCLAGLLMLLTVFGNVLVIIAVFTSRALKAPQNLFLVSLASADILVATLVIPFSLANEVMGYWYFGKTWCEIYLALDVLFCTSSIVHLCAISLDRYWSITQAIEYNLKRTPRRIKAIIITCWVISAVISFPPLISIEKKGGGGGPQPAEPRCEINDQKWYVISSCIGSFFAPCLIMILVYVRIYQIAKRRTRVPPSRRGPDAVAAPPGGTERRPNGLGPERSAGPGGAEAEPLPTQLNGAPGEPAPAGPRDTDALDLEESSSSDHAERPPGPRRPERGPRGKGKARASQVKPGDSLRGAGRGRRGSGRRLQGRGRSASGLPRRRAGAGGQNLEKRFTFVLAVVIGVFVVCWFPFFFTYTLTAVGCSVPRTLFKFFFWFGYCNSSLNPVIYTIFNHDFRRAFKKILCRGDRKRIV

SEQ ID NO: 41 - DNA, 3274 bp, Homo sapiens
atggaccaccaggacccctactccgtgcaggccacagcggccatagcggcggccatcaccttcctcattctctttaccatcttcggcaacgctctggtcatcctggctgtgttgaccagccgctcgctgcgcgcccctcagaacctgttcctggtgtcgctggccgccgccgacatcctggtggccacgctcatcatccctttctcgctggccaacgagctgctgggctactggtacttccggcgcacgtggtgcgaggtgtacctggcgctcgacgtgctcttctgcacctcgtccatcgtgcacctgtgcgccatcagcctggaccgctactgggccgtgagccgcgcgctggagtacaactccaagcgcaccccgcgccgcatcaagtgcatcatcctcactgtgtggctcatcgccgccgtcatctcgctgccgcccctcatctacaagggcgaccagggcccccagccgcgcgggcgcccccagtgcaagctcaaccaggaggcctggtacatcctggcctccagcatcggatctttctttgctccttgcctcatcatgatccttgtctacctgcgcatctacctgatcgccaaacgcagcaaccgcagaggtcccagggccaagggggggcctgggcagggtgagtccaagcagccccgacccgaccatggtggggctttggcctcagccaaactgccagccctggcctctgtggcttctgccagagaggtcaacggacactcgaagtccactggggagaaggaggagggggagacccctgaagatactgggacccgggccttgccacccagttgggctgcccttcccaactcaggccagggccagaaggagggtgtttgtggggcatctccagaggatgaagctgaagaggaggaagaggaggaggaggaggaggaagagtgtgaaccccaggcagtgccagtgtctccggcctcagcttgcagccccccgctgcagcagccacagggctcccgggtgctggccaccctacgtggccaggtgctcctgggcaggggcgtgggtgctataggtgggcagtggtggcgtcgaagggcgcacgtgacccgggagaagcgcttcaccttcgtgctggctgtggtcattggcgtttttgtgctctgctggttccccttcttcttcagctacagcctgggcgccatctgcccgaagcactgcaaggtgccccatggcctcttccagttcttcttctggatcggctactgcaacagctcactgaaccctgttatctacaccatcttcaaccaggacttccgccgtgccttccggaggatcctgtgccgcccgtggacccagacggcctggtgagcccgcctgcgctgcccctgtggggttggtgcggtggcgccggggtcaccctgcttcttgccctgctgtgtgtggctgcctcccctgggctttctgctccctgcccagatcctgtaggcctcatcttaggaaccccttgggaggggtgggcaggggggctgctagcaagggtcccagtgaagcttccccttgccggcttagctgtgggggaccccttctccaccctctccctgagcacaggccgatggaggtggttcaaatcctctggaacatagccaagaccaggagaagagagagcactttcttcccagagccccatgctctccagaccaatgtctgggcttccctttcttgaggaccttgtgttcctggcaggtcacttgcttgtggtgttttcgtttctttttcatctcccccccacccacaaagagcacggagccagccttccacttttcccagtggggcctgctgctgagggggaggaagaaacgaagactgatcacccacgctaggcactcgcggtcccggcaggcgctgggatgggggcttatggggtggcatcgtctctgggccctcctttccccctttgcctgtttcggatctgtggttcctttgaaagccagaacaatggatcggcttccttacccagcacccctccggtaggtgggtggccacgtggatgcctcgctggggaggtcttggaggcctggtctctgcctcgacgggagatccccgatcactggcattcaccccctgcaaaaatcggggcgacaatagctcactgcctacttgctgcagggagatgaaaggctttgcagaaagctttgagctctgtgggggaacacactagagaaccaaaaatgtgattatatggtgatataaaaatccctttcctctgtgtttaccaccacctgtcttcctgtagacttttgttctgtccctggggtgtgtgaattcctaccccgaactggaagccgggagtggcagacagaatcactatttcaagttaaaggatctctttgagaatgtgttcttctggctgcaaaggtctgagttattacgctacatgacaacgtttcgacatttcaccggcaacaccaagagggtttttagtggcttgggtctccccagtgggggataagtcttttgtcatcaaggaggcaaattgtctccccaagacagctcaaaatatccacacctcggcaacagtctaagatgagagcctgtgacaggtggcagcgcccccaggtggggtactggcatcagagcctggtgcgcccctaggggagcctcccactggagtgcccggccaggtctccaagccccaaatgagtccttgtgaaccacaactgatccccccaggtgggtgcttgtggactgcctcggacccagccacgctgctccccgcaatgctgatggggctgtgcattgaggacccctgcttcctggttctcagtcccaccccaaaacctggcacccagaacagttggaagtgtggaaaggaggtttatcggccttcccttggagagggcctggcttcaacattgggccagtaggcatcttagcttggcaggtgtcgggggaatgggccagatggacctgctagatttggaagggcaccgagggagttttctgggtgtagagagaatggaggggaccaaaaagagtccttcctggggtgtgggaggcttcccagcttggtcctcagtgggttgttgaggccagagtatcgccctgggatgtggtggggagctgggccaggagagggactgactgtgaccctctgctggccggtcttgtgtgcgccccatgggacccccagtgttcttgcctgtgacctcttattgcgacatgcaggtggtgtttttttttttttttaaactctgagctattttatcaataaaggatattttgtaataag

SEQ ID NO: 42 - protein, 450 aa, Homo sapiens
MDHQDPYSVQATAAIAAAITFLILFTIFGNALVILAVLTSRSLRAPQNLFLVSLAAADILVATLIIPFSLANELLGYWYFRRTWCEVYLALDVLFCTSSIVHLCAISLDRYWAVSRALEYNSKRTPRRIKCIILTVWLIAAVISLPPLIYKGDQGPQPRGRPQCKLNQEAWYILASSIGSFFAPCLIMILVYLRIYLIAKRSNRRGPRAKGGPGQGESKQPRPDHGGALASAKLPALASVASAREVNGHSKSTGEKEEGETPEDTGTRALPPSWAALPNSGQGQKEGVCGASPEDEAEEEEEEEEEEEECEPQAVPVSPASACSPPLQQPQGSRVLATLRGQVLLGRGVGAIGGQWWRRRAHVTREKRFTFVLAVVIGVFVLCWFPFFFSYSLGAICPKHCKVPHGLFQFFFWIGYCNSSLNPVIYTIFNQDFRRAFRRILCRPWTQTAW

SEQ ID NO: 43 - DNA, 2826 bp, Homo sapiens
ctgcaggcggccctggagggggcgccctcgccgagcgcgcgccccgcgccgccgccccggactcctccccggcgccgcgcgggcaggttcgaccaggcggccgcgggctccggttcccggccagctccccagggcccgcggcgccccgccccgcgcgcccgccccgctgcgctaactcgacccaagttggaagccgatcgcaggcggccgcactcgcgcccagcgagggcggcggcggcggcggcggcgcagctccggcgagcgaggcggcggccgcacggcaagcgtggaccgcggggggcgcccgcgccgggagcagccggaggactcgcggcggcgccggcgccccgcccgggaaagtaaagttggagacggagggagcgcgcggggcgggcccggaggagcggcggccggcgccccggcgcgcgcagccctagccgccggatgggaggcggacggcccgggccgccgccgccttgtcgcctgcgccccggctgggctccgggaccgcggggccgctacggcaccgccgctcggcccgcgtcgcgtgggctcgccgccggggcgctcccgtgagccgggccgaggcggggcgcgcgaggaccccgggacctgcccccctccccccgcagccgcgtcgccgctcgctccgggcgcctcctgctctgcacttacacgctcggcagctgcggggagcccggcagccacgctctccggcgcgccgcccgcggagccaccacggccgagggccggctgctgggcgccgcggtccccggcgggcgcgcccgagcagcaggcggcgatgcgggcgccgaccccggctggggggcgcccgagctgccgcggctgcgccccggctccaggaggggcggcgtagcccgcgggaggaccatggcgtccccggcgctggcggcggcgctggcggtggcggcagcggcgggccccaatgcgagcggcgcgggcgagaggggcagcggcggggttgccaatgcctcgggggcttcctgggggccgccgcgcggccagtactcggcgggcgcggtggcagggctggctgccgtggtgggcttcctcatcgtcttcaccgtggtgggcaacgtgctggtggtgatcgccgtgctgaccagccgggcgctgcgcgcgccacagaacctcttcctggtgtcgctggcctcggccgacatcctggtggccacgctggtcatgcccttctcgttggccaacgagctcatggcctactggtacttcgggcaggtgtggtgcggcgtgtacctggcgctcgatgtgctgttttgcacctcgtcgatcgtgcatctgtgtgccatcagcctggaccgctactggtcggtgacgcaggccgtcgagtacaacctgaagcgcacaccacgccgcgtcaaggccaccatcgtcgccgtgtggctcatctcggccgtcatctccttcccgccgctggtctcgctctaccgccagcccgacggcgccgcctacccgcagtgcggcctcaacgacgagacctggtacatcctgtcctcctgcatcggctccttcttcgcgccctgcctcatcatgggcctggtctacgcgcgcatctaccgagtggccaagcgtcgcacgcgcacgctcagcgagaagcgcgcccccgtgggccccgacggtgcgtccccgactaccgaaaacgggctgggcgcggcggcaggcgaggcgagaacgggcactgcgcgcccccgcccgccgacgtggagccggacgagagcagcgcagcggccgagaggcggcgcgccggggccgttgcggcggggcgggcggcggcgagcgggcgcggaggggggcgcgggcggtgcggacgggcagggggcggggccgggggcggctcagtcgggggcgctgaccgcctccaggtccccggggcccggtggccgcctctcgcgcgccagctcgcgctccgtcgagttcttcctgtcgcgccggcgccgggcgcgcagcagcgtgtgccgccgcaaggtggcccaggcgcgcgagaagcgcttcacctttgtgctggctgtggtcatgggcgtgttcgtgctctgctggttccccttcttcttcatctacagcctgtacggcatctgccgcgaggcctgccaggtgcccggcccgctcttcaagttcttcttctggatcggctactgcaacagctcgctcaacccggtcatctacacggtcttcaaccaggatttccggccatccttcaagcacatcctcttccgacggaggagaaggggcttcaggcagtgactcgcacccgtctgggaatcctggacagctccgcgctcggggctgggcagaaggggcggcccggacgcgggggagctttcccagagacccggggagctttcccagagacccggggatggattggcctccagggcgcaggggagggtgcggcagggcaggagcttggcagagagatagccgggctccagggagtggggaggagagagggggagacccctttgccttcccccctcagcaaggggctgcttctggggctccctgcctggatccagctctgggagccctgccgaggtgtggctgtgaggtcagggttttagagagcagtggcagaggtagccccctaaatgggcaagcaaggagccccccaaagacactaccactccccatccccgtctgaccaagggctgacttctccaggacctagtcggggggtggctgccagggggcaaggagaaagcaccgacaatctttgattactgaaagtatttaaatgtttgccaaaaacaacagccaaaacaaccaaactattttctaaataaacctttgtaa

SEQ ID NO: 44 - protein, 461 aa, Homo sapiens
MASPALAAALAVAAAAGPNASGAGERGSGGVANASGASWGPPRGQYSAGAVAGLAAVVGFLIVFTVVGNVLVVIAVLTSRALRAPQNLFLVSLASADILVATLVMPFSLANELMAYWYFGQVWCGVYLALDVLFCTSSIVHLCAISLDRYWSVTQAVEYNLKRTPRRVKATIVAVWLISAVISFPPLVSLYRQPDGAAYPQCGLNDETWYILSSCIGSFFAPCLIMGLVYARIYRVAKRRTRTLSEKRAPVGPDGASPTTENGLGAAAGEARTGTARPRPPTWSRTRAAQRPRGGAPGPLRRGGRRRAGAEGGAGGADGQGAGPGAAQSGALTASRSPGPGGRLSRASSRSVEFFLSRRRRARSSVCRRKVAQAREKRFTFVLAVVMGVFVLCWFPFFFIYSLYGICREACQVPGPLFKFFFWIGYCNSSLNPVIYTVFNQDFRPSFKHILFRRRRRGFRQ

SEQ ID NO: 45 - DNA, 1082 bp, Homo sapiens
ctgtgcatggcatcatcctggccccctctagagctccaatcctccaaccagagccagctcttccctcaaaatgctacggcctgtgacaatgctccagaagcctgggacctgctgcacagagtgctgccgacatttatcatctccatctgtttcttcggcctcctagggaacctttttgtcctgttggtcttcctcctgccccggcggcaactgaacgtggcagaaatctacctggccaacctggcagcctctgatctggtgtttgtcttgggcttgcccttctgggcagagaatatctggaaccagtttaactggcctttcggagccctcctctgccgtgtcatcaacggggtcatcaaggccaatttgttcatcagcatcttcctggtggtggccatcagccaggaccgctaccgcgtgctggtgcaccctatggccagcggaaggcagcagcggcggaggcaggcccgggtcacctgcgtgctcatctgggttgtggggggcctcttgagcatccccacattcctgctgcgatccatccaagccgtcccagatctgaacatcaccgcctgcatcctgctcctcccccatgaggcctggcactttgcaaggattgtggagttaaatattctgggtttcctcctaccactggctgcgatcgtcttcttcaactaccacatcctggcctccctgcgaacgcgggaggaggtcagcaggacaagagtgcgggggccgaaggatagcaagaccacagcgctgatcctcacgctcgtggttgccttcctggtctgctgggccccttaccacttctttgccttcctggaattcttattccaggtgcaagcagtccgaggctgcttttgggaggacttcattgacctgggcctgcaattggccaacttctttgccttcactaacagctccctgaatccagtaatttatgtctttgtgggccggctcttcaggaccaaggtctgggaactttataaacaatgcacccctaaaagtcttgctccaatatcttcatcccataggaaagaaatcttccaacttttctggcggaattaaaacagcattgaacc

SEQ ID NO: 46 - protein, 353 aa, Homo sapiens
MASSWPPLELQSSNQSQLFPQNATACDNAPEAWDLLHRVLPTFIISICFFGLLGNLFVLLVFLLPRRQLNVAEIYLANLAASDLVFVLGLPFWAENIWNQFNWPFGALLCRVINGVIKANLFISIFLVVAISQDRYRVLVHPMASGRQQRRRQARVTCVLIWVVGGLLSIPTFLLRSIQAVPDLNITACILLLPHEAWHFARIVELNILGFLLPLAAIVFFNYHILASLRTREEVSRTRVRGPKDSKTTALILTLVVAFLVCWAPYHFFAFLEFLFQVQAVRGCFWEDFIDLGLQLANFFAFTNSSLNPVIYVFVGRLFRTKVWELYKQCTPKSLAPISSSHRKEIFQLFWRN

SEQ ID NO: 47 - DNA, 3733 bp, Homo sapiens
atgttctctccctggaagatatcaatgtttctgtctgttcgtgaggactccgtgcccaccacggcctctttcagcgccgacatgctcaatgtcaccttgcaagggcccactcttaacgggacctttgcccagagcaaatgcccccaagtggagtggctgggctggctcaacaccatccagccccccttcctctgggtgctgttcgtgctggccaccctagagaacatctttgtcctcagcgtcttctgcctgcacaagagcagctgcacggtggcagagatctacctggggaacctggccgcagcagacctgatcctggcctgcgggctgcccttctgggccatcaccatctccaacaacttcgactggctctttggggagacgctctgccgcgtggtgaatgccattatctccatgaacctgtacagcagcatctgtttcctgatgctggtgagcatcgaccgctacctggccctggtgaaaaccatgtccatgggccggatgcgcggcgtgcgctgggccaagctctacagcttggtgatctgggggtgtacgctgctcctgagctcacccatgctggtgttccggaccatgaaggagtacagcgatgagggccacaacgtcaccgcttgtgtcatcagctacccatccctcatctgggaagtgttcaccaacatgctcctgaatgtcgtgggcttcctgctgcccctgagtgtcatcaccttctgcacgatgcagatcatgcaggtgctgcggaacaacgagatgcagaagttcaaggagatccagacggagaggagggccacggtgctagtcctggttgtgctgctgctattcatcatctgctggctgcccttccagatcagcaccttcctggatacgctgcatcgcctcggcatcctctccagctgccaggacgagcgcatcatcgatgtaatcacacagatcgcctccttcatggcctacagcaacagctgcctcaacccactggtgtacgtgatcgtgggcaagcgcttccgaaagaagtcttgggaggtgtaccagggagtgtgccagaaagggggctgcaggtcagaacccattcagatggagaactccatgggcacactgcggacctccatctccgtggaacgccagattcacaaactgcaggactgggcagggagcagacagtgagcaaacgccagcagggctgctgtgaatttgtgtaaggattgagggacagttgcttttcagcatgggcccaggaatgccaaggagacatctatgcacgaccttgggaaatgagttgatgtctccggtaaaacaccggagactaattcctgccctgcccaattttgcagggagcatggctgtgaggatggggtgaactcacgcacagccaaggactccaaaatcacaacagcattactgttcttatttgctgccacacctgagccagcctgctccttcccaggagtggaggaggcctggggggagggagaggagtgactgagcttccctcccgtgtgttctccgtccctgccccagcaagacaacttagatctccaggagaactgccatccagctttggtgcaatggctgagtgcacaagtgagttgttgccctgggtttctttaatctattcagctagaactttgaaggacaatttcttgcattaataaaggttaagccctgaggggtccctgataacaacctggagaccaggattttatggctcccctcactgatggacaaggaggtctgtgccaaagaagaatccaataagcacatattgagcacttgctgtatatgcagtattgagcactgtaggcaagacccaagaaagagaaggagccatctccatcttgaaggaactcaaagactcaagtgggaacgactgggcactgccaccaccagaaagctgttcgacgagacggtcgagcagggtgctgtgggtgatatggacagcagaagggggagaccaaggttccagctcaaccaataactattgcacaaccacctgtccctgcctcagttcccttttatgtaacatgaagtcgttgtgagggttaaaggcagtaacaggtataaagtacttagaaaagcaaagggtgctacgtacatgtgaggcatcattacgcagacgtaactgggatatgtttactataaggaaaagacactgaggtctagaaatagctccgtggagcagaatcagtattgggagccggtggcggtgtgaagcaccagtgtctggcacacagtaggtgctcattggctcccttccacctgtcattcccaccaccctgaggccccaaccgccacacacacaggagcatttggagagaaggccatgtcttcaaagtctgatttgtgatgaggcagaggaagatatttctaatcggtcttgcccagaggatcacagtgctgagaccccccaccaccagccggtacctgggaagggggagagtgcaggcctgctcagggactgttcctgtctcagcaaccaagggattgttcctgtcaatcaatggtttattggaaggtggcccagtatgagccctagaagagtgtgaaaaggaatggcaatggtgttcaccatcggcagtgccagggcagcactcattcacttgataaatgaatatttattagctggttggagagctagaacctggagagctagaacctggagaactagaacctggagggctagaacctggagaggctagaaccaagaagggctagaacctggaggggctagaacctagagaagctaaaacctgagctagaagctggaggactagaacctggagggctggaatctgaagggctagaacctggagggctggaatctggagagctagaacctggagggctagaacctggagggctagaacctagaagggctagaacctggagggctggaatctggagagctagaacctggagggctagaacctggagggctagaacctagaagggctagaacctggagggctagaacctggcaggttagaacctagaagggctagaacctggagagccagaacctggagggctagaacctggaagggctagaacctgtagagctagaacatggagagctagaacccggcaggctagaacctggcaagctagaacctggagggaatgaacctggagggctagaacctggagaatgagaaaaatttacatggcaaagagcccataaatcctgaccaatccaactctgaattttaaagcaaaagcgtgaaaaaaaagattccctccttacccccaacccactcttttttcccaccacccactctcctctgcctcagtaagtatctggaggaagaaaacaggtgaaagaagaagtaaaaaccatttagtattagtattagaatgaagtcaaactgtgccacacatggtgaatgaaaaaaaaaaaaaagaggctgtgttttgtcacacagggcagtcattcagcaccagagcacgtgatggtctgagactctcttaggagcagagctctgccgcaatggccatgtggggatccacacctggtctgaggggcaactgagtctgcgggagaagagcggccctatgcatggtgtagatgccctgataaagaacatctgtcctgtgaaagactcaatgagctgttatgttgtaaacaggaagcatttcacatccaaacgagaaaatcatgtaaacatgtgtcttttctgtagagcataataaatggatgaggtttttgcaaaaaaaaaaaaaaaaa

SEQ ID NO: 48 - protein, 391 aa, Homo sapiens
MFSPWKISMFLSVREDSVPTTASFSADMLNVTLQGPTLNGTFAQSKCPQVEWLGWLNTIQPPFLWVLFVLATLENIFVLSVFCLHKSSCTVAEIYLGNLAAADLILACGLPFWAITISNNFDWLFGETLCRVVNAIISMNLYSSICFLMLVSIDRYLALVKTMSMGRMRGVRWAKLYSLVIWGCTLLLSSPMLVFRTMKEYSDEGHNVTACVISYPSLIWEVFTNMLLNVVGFLLPLSVITFCTMQIMQVLRNNEMQKFKEIQTERRATVLVLVVLLLFIICWLPFQISTFLDTLHRLGILSSCQDERIIDVITQIASFMAYSNSCLNPLVYVIVGKRFRKKSWEVYQGVCQKGGCRSEPIQMENSMGTLRTSISVERQIHKLQDWAGSRQ

SEQ ID NO: 49 - DNA, 1723 bp, Homo sapiens
tgctacccgcgcccgggcttctggggtgttccccaaccacggcccagccctgccacaccccccgcccccggcctccgcagctcggcatgggcgcgggggtgctcgtcctgggcgcctccgagcccggtaacctgtcgtcggccgcaccgctccccgacggcgcggccaccgcggcgcggctgctggtgcccgcgtcgccgcccgcctcgttgctgcctcccgccagcgaaagccccgagccgctgtctcagcagtggacagcgggcatgggtctgctgatggcgctcatcgtgctgctcatcgtggcgggcaatgtgctggtgatcgtggccatcgccaagacgccgcggctgcagacgctcaccaacctcttcatcatgtccctggccagcgccgacctggtcatggggctgctggtggtgccgttcggggccaccatcgtggtgtggggccgctgggagtacggctccttcttctgcgagctgtggacctcagtggacgtgctgtgcgtgacggccagcatcgagaccctgtgtgtcattgccctggaccgctacctcgccatcacctcgcccttccgctaccagagcctgctgacgcgcgcgcgggcgcggggcctcgtgtgcaccgtgtgggccatctcggccctggtgtccttcctgcccatcctcatgcactggtggcgggcggagagcgacgaggcgcgccgctgctacaacgaccccaagtgctgcgacttcgtcaccaaccgggcctacgccatcgcctcgtccgtagtctccttctacgtgcccctgtgcatcatggccttcgtgtacctgcgggtgttccgcgaggcccagaagcaggtgaagaagatcgacagctgcgagcgccgtttcctcggcggcccagcgcggccgccctcgccctcgccctcgcccgtccccgcgcccgcgccgccgcccggacccccgcgccccgccgccgccgccgccaccgccccgctggccaacgggcgtgcgggtaagcggcggccctcgcgcctcgtggccctacgcgagcagaaggcgctcaagacgctgggcatcatcatgggcgtcttcacgctctgctggctgcccttcttcctggccaacgtggtgaaggccttccaccgcgagctggtgcccgaccgcctcttcgtcttcttcaactggctgggctacgccaactcggccttcaaccccatcatctactgccgcagccccgacttccgcaaggccttccagggactgctctgctgcgcgcgcagggctgcccgccggcgccacgcgacccacggagaccggccgcgcgcctcgggctgtctggcccggcccggacccccgccatcgcccggggccgcctcggacgacgacgacgacgatgtcgtcggggccacgccgcccgcgcgcctgctggagccctgggccggctgcaacggcggggcggcggcggacagcgactcgagcctggacgagccgtgccgccccggcttcgcctcggaatccaaggtgtagggcccggcgcggggcgcggactccgggcacggcttcccaggggaacgaggagatctgtgtttacttaagaccgatagcaggtgaactcgaagcccacaatcctcgtctgaatcatccgaggcaaagagaaaagccacggaccgttgcacaaaaaggaaagtttgggaagggatgggagagtggcttgctgatgttccttgttg

SEQ ID NO: 50 - protein, 477 aa, Homo sapiens
MGAGVLVLGASEPGNLSSAAPLPDGAATAARLLVPASPPASLLPPASESPEPLSQQWTAGMGLLMALIVLLIVAGNVLVIVAIAKTPRLQTLTNLFIMSLASADLVMGLLVVPFGATIVVWGRWEYGSFFCELWTSVDVLCVTASIETLCVIALDRYLAITSPFRYQSLLTRARARGLVCTVWAISALVSFLPILMHWWRAESDEARRCYNDPKCCDFVTNRAYAIASSVVSFYVPLCIMAFVYLRVFREAQKQVKKIDSCERRFLGGPARPPSPSPSPVPAPAPPPGPPRPAAAAATAPLANGRAGKRRPSRLVALREQKALKTLGIIMGVFTLCWLPFFLANVVKAFHRELVPDRLFVFFNWLGYANSAFNPIIYCRSPDFRKAFQGLLCCARRAARRRHATHGDRPRASGCLARPGPPPSPGAASDDDDDDVVGATPPARLLEPWAGCNGGAAADSDSSLDEPCRPGFASESKV

SEQ ID NO: 51 - DNA, 2015 bp, Homo sapiens
actgcgaagcggcttcttcagagcacgggctggaactggcaggcaccgcgagcccctagcacccgacaagctgagtgtgcaggacgagtccccaccacacccacaccacagccgctgaatgaggcttccaggcgtccgctcgcggcccgcagagccccgccgtgggtccgcccgctgaggcgcccccagccagtgcgcttacctgccagactgcgcgccatggggcaacccgggaacggcagcgccttcttgctggcacccaatagaagccatgcgccggaccacgacgtcacgcagcaaagggacgaggtgtgggtggtgggcatgggcatcgtcatgtctctcatcgtcctggccatcgtgtttggcaatgtgctggtcatcacagccattgccaagttcgagcgtctgcagacggtcaccaactacttcatcacttcactggcctgtgctgatctggtcatgggcctggcagtggtgccctttggggccgcccatattcttatgaaaatgtggacttttggcaacttctggtgcgagttttggacttccattgatgtgctgtgcgtcacggccagcattgagaccctgtgcgtgatcgcagtggatcgctactttgccattacttcacctttcaagtaccagagcctgctgaccaagaataaggcccgggtgatcattctgatggtgtggattgtgtcaggccttacctccttcttgcccattcagatgcactggtaccgggccacccaccaggaagccatcaactgctatgccaatgagacctgctgtgacttcttcacgaaccaagcctatgccattgcctcttccatcgtgtccttctacgttcccctggtgatcatggtcttcgtctactccagggtctttcaggaggccaaaaggcagctccagaagattgacaaatctgagggccgcttccatgtccagaaccttagccaggtggagcaggatgggcggacggggcatggactccgcagatcttccaagttctgcttgaaggagcacaaagccctcaagacgttaggcatcatcatgggcactttcaccctctgctggctgcccttcttcatcgttaacattgtgcatgtgatccaggataacctcatccgtaaggaagtttacatcctcctaaattggataggctatgtcaattctggtttcaatccccttatctactgccggagcccagatttcaggattgccttccaggagcttctgtgcctgcgcaggtcttctttgaaggcctatgggaatggctactccagcaacggcaacacaggggagcagagtggatatcacgtggaacaggagaaagaaaataaactgctgtgtgaagacctcccaggcacggaagactttgtgggccatcaaggtactgtgcctagcgataacattgattcacaagggaggaattgtagtacaaatgactcactgctgtaaagcagtttttctacttttaaagacccccccccccccaacagaacactaaacagactatttaacttgagggtaataaacttagaataaaattgtaaaaattgtatagagatatgcagaaggaagggcatccttctgccttttttatttttttaagctgtaaaaagagagaaaacttatttgagtgattatttgttatttgtacagttcagttcctctttgcatggaatttgtaagtttatgtctaaagagctttagtcctagaggacctgagtctgctatattttcatgacttttccatgtatctacctcactattcaagtattaggggtaatatattgctgctggtaatttgtatctgaaggagattttccttcctacacccttggacttgaggattttgagtatctcggacctttcagctgtgaacatggactcttcccccactcctcttatttgctcacacggggtattttaggcagggatttgaggagcagcttcagttgttttcccgagcaaaggtctaaagtttacagtaaataaaatgtttgaccatg

SEQ ID NO: 52 - protein, 413 aa, Homo sapiens
MGQPGNGSAFLLAPNRSHAPDHDVTQQRDEVWVVGMGIVMSLIVLAIVFGNVLVITAIAKFERLQTVTNYFITSLACADLVMGLAVVPFGAAHILMKMWTFGNFWCEFWTSIDVLCVTASIETLCVIAVDRYFAITSPFKYQSLLTKNKARVIILMVWIVSGLTSFLPIQMHWYRATHQEAINCYANETCCDFFTNQAYAIASSIVSFYVPLVIMVFVYSRVFQEAKRQLQKIDKSEGRFHVQNLSQVEQDGRTGHGLRRSSKFCLKEHKALKTLGIIMGTFTLCWLPFFIVNIVHVIQDNLIRKEVYILLNWIGYVNSGFNPLIYCRSPDFRIAFQELLCLRRSSLKAYGNGYSSNGNTGEQSGYHVEQEKENKLLCEDLPGTEDFVGHQGTVPSDNIDSQGRNCSTNDSLL

SEQ ID NO: 53 - DNA, 2644 bp, Homo sapiens
gctactcctcccccaagagcggtggcaccgagggagttggggtggggggaggctgagcgctctggctgggacagctagagaagatggcccaggctggggaagtcgctctcatgccttgctgtcccctcccctgagccaggtgatttgggagaccccctccttccttctttccctaccgccccacgcgcgacccggggatggctccgtggcctcacgagaacagctctcttgccccatggccggacctccccaccctggcgcccaataccgccaacaccagtgggctgccaggggttccgtgggaggcggccctagccggggccctgctggcgctggcggtgctggccaccgtgggaggcaacctgctggtcatcgtggccatcgcctggactccgagactccagaccatgaccaacgtgttcgtgacttcgctggccgcagccgacctggtgatgggactcctggtggtgccgccggcggccaccttggcgctgactggccactggccgttgggcgccactggctgcgagctgtggacctcggtggacgtgctgtgtgtgaccgccagcatcgaaaccctgtgcgccctggccgtggaccgctacctggctgtgaccaacccgctgcgttacggcgcactggtcaccaagcgctgcgcccggacagctgtggtcctggtgtgggtcgtgtcggccgcggtgtcgtttgcgcccatcatgagccagtggtggcgcgtaggggccgacgccgaggcgcagcgctgccactccaacccgcgctgctgtgccttcgcctccaacatgccctacgtgctgctgtcctcctccgtctccttctaccttcctcttctcgtgatgctcttcgtctacgcgcgggttttcgtggtggctacgcgccagctgcgcttgctgcgcggggagctgggccgctttccgcccgaggagtctccgccggcgccgtcgcgctctctggccccggccccggtggggacgtgcgctccgcccgaaggggtgcccgcctgcggccggcggcccgcgcgcctcctgcctctccgggaacaccgggccctgtgcaccttgggtctcatcatgggcaccttcactctctgctggttgcccttctttctggccaacgtgctgcgcgccctggggggcccctctctagtcccgggcccggctttccttgccctgaactggctaggttatgccaattctgccttcaacccgctcatctactgccgcagcccggactttcgcagcgccttccgccgtcttctgtgccgctgcggccgtcgcctgcctccggagccctgcgccgccgcccgcccggccctcttcccctcgggcgttcctgcggcccggagcagcccagcgcagcccaggctttgccaacggctcgacggggcttcttggggagtttcttaggcctgaaggacaagaagcaacaactctgttgatcagaacctgtggaaaacctctggcctctgttcagaatgagtcccatgggattccccggctgtgacactctaccctccagaacctgacgactgggccatgtgacccaaggagggatccttaccaagtgggttttcaccatcctcttgctctctgtctgagagatgttttctaaaccccagccttgaacttcactcctccctcagtggtagtgtccaggtgccgtggagcagcaggctggctttggtaggggcacccatcacccggcttgcctgtgcagtcagtgagtgcttagggcaaagagagctcccctggttccattccttctgccacccaaaccctgatgagaccttagtgttctccaggctctgtggcccaggctgagagcagcagggtagaaaagaccaagatttggggttttatctctggttcccttattactgctctcaagcagtggcctctctcactttagccatggaatggctccgatctacctcacagcagtgtcagaaggacttcgccagggttttgggagctccagggttcataagaaggtgaaccattagaacagatcccttcttttccttttgcaatcagataaataaatatcactgaatgcagttcatcctcggcccactttccctccgtttgttttcttttcataatccacttactcccttcccttctactctgcgctggcttttgacagaggcagtaaattaggcctaatcctcactcttttcttcctaatcttcatcaaacaaaaaatgaaaagtctgtctggacgaaggggagtgagcttgagcctttgatatcttgctcccccacccttcctgaaactcttgaaatccagttgccattgagtagcaaagccacgctccccacaggacttggacagagggcccacagggggatgggctggctgtggccaggtttagggcagggggcatttgtcccctccatgctataatccagtggtgccttacatggtgtgtgtgtgtgtgtgtgcgtgtgtgtgtgtgtgtgtgtgtctggaggcacaggcacaaagcattgcttgggttggtcaaatgtcttgtgtcataaatatattctgatgtttcccagcctttccacaacctctaccttcccactcaccttccccagctacaaaaatctgtattatcctcttaaagtaaaactggagttac

SEQ ID NO: 54 - protein, 408 aa, Homo sapiens
MAPWPHENSSLAPWPDLPTLAPNTANTSGLPGVPWEAALAGALLALAVLATVGGNLLVIVAIAWTPRLQTMTNVFVTSLAAADLVMGLLVVPPAATLALTGHWPLGATGCELWTSVDVLCVTASIETLCALAVDRYLAVTNPLRYGALVTKRCARTAVVLVWVVSAAVSFAPIMSQWWRVGADAEAQRCHSNPRCCAFASNMPYVLLSSSVSFYLPLLVMLFVYARVFVVATRQLRLLRGELGRFPPEESPPAPSRSLAPAPVGTCAPPEGVPACGRRPARLLPLREHRALCTLGLIMGTFTLCWLPFFLANVLRALGGPSLVPGPAFLALNWLGYANSAFNPLIYCRSPDFRSAFRRLLCRCGRRLPPEPCAAARPALFPSGVPAARSSPAQPRLCQRLDGASWGVS

SEQ ID NO: 55 - DNA, 1101 bp, Homo sapiens
ggcatccatgagaaaaatgtcggaggaagagttttatctgttcaaaaatatctcttcagtggggccgtgggatgggcctcagtaccacattgcccctgtctgggccttctacctccaggcagctttcatgggcactgtcttccttatagggttcccactcaatgccatggtgctggtggccacactgcgctacaaaaagttgcggcagcccctcaactacattctggtcaacgtgtccttcggaggcttcctcctctgcatcttctctgtcttccctgtcttcgtcgccagctgtaacggatacttcgtcttcggtcgccatgtttgtgctttggagggcttcctgggcactgtagcaggtctggttacaggatggtcactggccttcctggcctttgagcgctacattgtcatctgtaagcccttcggcaacttccgcttcagctccaagcatgcactgacggtggtcctggctacctggaccattggtattggcgtctccatcccacccttctttggctggagccggttcatccctgagggcctgcagtgttcctgtggccctgactggtacaccgtgggcaccaaataccgcagcgagtcctatacgtggttcctcttcatcttctgcttcattgtgcctctctccctcatctgcttctcctacactcagctgctgagggccctgaaagctgttgcagctcagcagcaggagtcagctacgacccagaaggctgaacgggaggtgagccgcatggtggttgtgatggtaggatccttctgtgtctgctacgtgccctacgcggccttcgccatgtacatggtcaacaaccgtaaccatgggctggacttacggcttgtcaccattccttcattcttctccaagagtgcttgcatctacaatcccatcatctactgcttcatgaataagcagttccaagcttgcatcatgaagatggtgtgtgggaaggccatgacagatgaatccgacacatgcagctcccagaaaacagaagtttctactgtctcgtctacccaagttggccccaactgaggacccaatattggcctgtttgcaacagctagaattaaattttactt

SEQ ID NO: 56 - protein, 348 aa, Homo sapiens
MRKMSEEEFYLFKNISSVGPWDGPQYHIAPVWAFYLQAAFMGTVFLIGFPLNAMVLVATLRYKKLRQPLNYILVNVSFGGFLLCIFSVFPVFVASCNGYFVFGRHVCALEGFLGTVAGLVTGWSLAFLAFERYIVICKPFGNFRFSSKHALTVVLATWTIGIGVSIPPFFGWSRFIPEGLQCSCGPDWYTVGTKYRSESYTWFLFIFCFIVPLSLICFSYTQLLRALKAVAAQQQESATTQKAEREVSRMVVVMVGSFCVCYVPYAAFAMYMVNNRNHGLDLRLVTIPSFFSKSACIYNPIIYCFMNKQFQACIMKMVCGKAMTDESDTCSSQKTEVSTVSSTQVGPN

SEQ ID NO: 57 - DNA, 1413 bp, Homo sapiens
gagtatctggatgtcttggattttcttcccattctgttctgttctgttctcctaataccatctcgttactagacgtaggcattggacgtgacaatcaactgcatttgaactgagaagaagaaatattaaagacacagtcttcagaagaaatggctcaaaggcagcctcactcacctaatcagactttaatttcaatcacaaatgacacagaatcatcaagctctgtggtttctaacgataacacaaataaaggatggagcggggacaactctccaggaatagaagcattgtgtgccatctatattacttatgctgtgatcatttcagtgggcatccttggaaatgctattctcatcaaagtctttttcaagaccaaatccatgcaaacagttccaaatattttcatcaccagcctggcttttggagatcttttacttctgctaacttgtgtgccagtggatgcaactcactaccttgcagaaggatggctgttcggaagaattggttgtaaggtgctctctttcatccggctcacttctgttggtgtgtcagtgttcacattaacaattctcagcgctgacagatacaaggcagttgtgaagccacttgagcgacagccctccaatgccatcctgaagacttgtgtaaaagctggctgcgtctggatcgtgtctatgatatttgctctacctgaggctatattttcaaatgtatacacttttcgagatcccaataaaaatatgacatttgaatcatgtacctcttatcctgtctctaagaagctcttgcaagaaatacattctctgctgtgcttcttagtgttctacattattccactctctattatctctgtctactattccttgattgctaggaccctttacaaaagcaccctgaacatacctactgaggaacaaagccatgcccgtaagcagattgaatcccgaaagagaattgccagaacggtattggtgttggtggctctgtttgccctctgctggttgccaaatcacctcctgtacctctaccattcattcacttctcaaacctatgtagacccctctgccatgcatttcattttcaccattttctctcgggttttggctttcagcaattcttgcgtaaacccctttgctctctactggctgagcaaaagcttccagaagcattttaaagctcagttgttctgttgcaaggcggagcggcctgagcctcctgttgctgacacctctcttaccaccctggctgtgatgggaacggtcccgggcactgggagcatacagatgtctgaaattagtgtgacctcgttcactgggtgtagtgtgaagcaggcagaggacagattctagcttttcaaggaaaaatgctgcttctcctcccagcgtgtgtatccgactctaagctgtgtgcagg

SEQ ID NO: 58 - protein, 399 aa, Homo sapiens
MAQRQPHSPNQTLISITNDTESSSSVVSNDNTNKGWSGDNSPGIEALCAIYITYAVIISVGILGNAILIKVFFKTKSMQTVPNIFITSLAFGDLLLLLTCVPVDATHYLAEGWLFGRIGCKVLSFIRLTSVGVSVFTLTILSADRYKAVVKPLERQPSNAILKTCVKAGCVWIVSMIFALPEAIFSNVYTFRDPNKNMTFESCTSYPVSKKLLQEIHSLLCFLVFYIIPLSIISVYYSLIARTLYKSTLNIPTEEQSHARKQIESRKRIARTVLVLVALFALCWLPNHLLYLYHSFTSQTYVDPSAMHFIFTIFSRVLAFSNSCVNPFALYWLSKSFQKHFKAQLFCCKAERPEPPVADTSLTTLAVMGTVPGTGSIQMSEISVTSFTGCSVKQAEDRF

SEQ ID NO: 59 - DNA, 2824 bp, Homo sapiens
gctgccacctctctagaggcacctggcggggagcctctcaacataagacagtgaccagtctggtgactcacagccggcacagccatgaactacccgctaacgctggaaatggacctcgagaacctggaggacctgttctgggaactggacagattggacaactataacgacacctccctggtggaaaatcatctctgccctgccacagaggggcccctcatggcctccttcaaggccgtgttcgtgcccgtggcctacagcctcatcttcctcctgggcgtgatcggcaacgtcctggtgctggtgatcctggagcggcaccggcagacacgcagttccacggagaccttcctgttccacctggccgtggccgacctcctgctggtcttcatcttgccctttgccgtggccgagggctctgtgggctgggtcctggggaccttcctctgcaaaactgtgattgccctgcacaaagtcaacttctactgcagcagcctgctcctggcctgcatcgccgtggaccgctacctggccattgtccacgccgtccatgcctaccgccaccgccgcctcctctccatccacatcacctgtgggaccatctggctggtgggcttcctccttgccttgccagagattctcttcgccaaagtcagccaaggccatcacaacaactccctgccacgttgcaccttctcccaagagaaccaagcagaaacgcatgcctggttcacctcccgattcctctaccatgtggcgggattcctgctgcccatgctggtgatgggctggtgctacgtgggggtagtgcacaggttgcgccaggcccagcggcgccctcagcggcagaaggcagtcagggtggccatcctggtgacaagcatcttcttcctctgctggtcaccctaccacatcgtcatcttcctggacaccctggcgaggctgaaggccgtggacaatacctgcaagctgaatggctctctccccgtggccatcaccatgtgtgagttcctgggcctggcccactgctgcctcaaccccatgctctacactttcgccggcgtgaagttccgcagtgacctgtcgcggctcctgacgaagctgggctgtaccggccctgcctccctgtgccagctcttccctagctggcgcaggagcagtctctctgagtcagagaatgccacctctctcaccacgttctaggtcccagtgtccccttttattgctgcttttccttggggcaggcagtgatgctggatgctccttccaacaggagctgggatcctaagggctcaccgtggctaagagtgtcctaggagtatcctcatttggggtagctagaggaaccaacccccatttctagaacatccctgccagctcttctgccggccctggggctaggctggagcccagggagcggaaagcagctcaaaggcacagtgaaggctgtccttacccatctgcacccccctgggctgagagaacctcacgcacctcccatcctaatcatccaatgctcaagaaacaacttctacttctgcccttgccaacggagagcgcctgcccctcccagaacacactccatcagcttaggggctgctgacctccacagcttcccctctctcctcctgcccacctgtcaaacaaagccagaagctgagcaccaggggatgagtggaggttaaggctgaggaaaggccagctggcagcagagtgtggccttcggacaactcagtccctaaaaacacagacattctgccaggcccccaagcctgcagtcatcttgaccaagcaggaagctcagactggttgagttcaggtagctgcccctggctctgaccgaaacagcgctgggtccaccccatgtcaccggatcctgggtggtctgcaggcagggctgactctaggtgcccttggaggccagccagtgacctgaggaagcgtgaaggccgagaagcaagaaagaaacccgacagagggaagaaaagagctttcttcccgaaccccaaggagggagatggatcaatcaaacccggcggtcccctccgccaggcgagatggggtggggtggagaactcctagggtggctgggtccaggggatgggaggttgtgggcattgatggggaaggaggctggcttgtcccctcctcactcccttcccataagctatagacccgaggaaactcagagtcggaacggagaaaggtggactggaaggggcccgtgggagtcatctcaaccatcccctccgtggcatcaccttaggcagggaagtgtaagaaacacactgaggcagggaagtccccaggccccaggaagccgtgccctgcccccgtgaggatgtcactcagatggaaccgcaggaagctgctccgtgcttgtttgctcacctggggtgtgggaggcccgtccggcagttctgggtgctccctaccacctccccagcctttgatcaggtggggagtcagggacccctgcccttgtcccactcaagccaagcagccaagctccttgggaggccccactggggaaataacagctgtggctcacgtgagagtgtcttcacggcaggacaacgaggaagccctaagacgtcccttttttctctgagtatctcctcgcaagctgggtaatcgatgggggagtctgaagcagatgcaaagaggcaagaggctggattttgaattttctttttaataaaaaggcacctataaaacaggtcaatacagtacaggcagcacagagacccccggaacaagcctaaaaattgtttcaaaataaaaaccaagaagatgtcttcaaaaaaaaaaaaaaaaaaaaaaa

SEQ ID NO: 60 - protein, 372 aa, Homo sapiens
MNYPLTLEMDLENLEDLFWELDRLDNYNDTSLVENHLCPATEGPLMASFKAVFVPVAYSLIFLLGVIGNVLVLVILERHRQTRSSTETFLFHLAVADLLLVFILPFAVAEGSVGWVLGTFLCKTVIALHKVNFYCSSLLLACIAVDRYLAIVHAVHAYRHRRLLSIHITCGTIWLVGFLLALPEILFAKVSQGHHNNSLPRCTFSQENQAETHAWFTSRFLYHVAGFLLPMLVMGWCYVGVVHRLRQAQRRPQRQKAVRVAILVTSIFFLCWSPYHIVIFLDTLARLKAVDNTCKLNGSLPVAITMCEFLGLAHCCLNPMLYTFAGVKFRSDLSRLLTKLGCTGPASLCQLFPSWRRSSLSESENATSLTTF

SEQ ID NO: 61 - DNA, 2156 bp, Homo sapiens
ggcacgagcccagaaacaaagacttcacggacaaagtcccttggaaccagagagaagccgggatggaaactccaaacaccacagaggactatgacacgaccacagagtttgactatggggatgcaactccgtgccagaaggtgaacgagagggcctttggggcccaactgctgccccctctgtactccttggtatttgtcattggcctggttggaaacatcctggtggtcctggtccttgtgcaatacaagaggctaaaaaacatgaccagcatctacctcctgaacctggccatttctgacctgctcttcctgttcacgcttcccttctggatcgactacaagttgaaggatgactgggtttttggtgatgccatgtgtaagatcctctctgggttttattacacaggcttgtacagcgagatctttttcatcatcctgctgacgattgacaggtacctggccatcgtccacgccgtgtttgccttgcgggcacggaccgtcacttttggtgtcatcaccagcatcatcatttgggccctggccatcttggcttccatgccaggcttatacttttccaagacccaatgggaattcactcaccacacctgcagccttcactttcctcacgaaagcctacgagagtggaagctgtttcaggctctgaaactgaacctctttgggctggtattgcctttgttggtcatgatcatctgctacacagggattataaagattctgctaagacgaccaaatgagaagaaatccaaagctgtccgtttgatttttgtcatcatgatcatcttttttctcttttggaccccctacaatttgactatacttatttctgttttccaagacttcctgttcacccatgagtgtgagcagagcagacatttggacctggctgtgcaagtgacggaggtgatcgcctacacgcactgctgtgtcaacccagtgatctacgccttcgttggtgagaggttccggaagtacctgcggcagttgttccacaggcgtgtggctgtgcacctggttaaatggctccccttcctctccgtggacaggctggagagggtcagctccacatctccctccacaggggagcatgaactctctgctgggttctgactcagaccataggaggccaacccaaaataagcaggcgtgacctgccaggcacactgagccagcagcctggctctcccagccaggttctgactcttggcacagcatggagtcacagccacttgggatagagagggaatgtaatggtggcctggggcttctgaggcttctggggcttcagtcttttccatgaacttctcccctggtagaaagaagatgaatgagcaaaaccaaatattccagagactgggactaagtgtaccagagaagggcttggactcaagcaagatttcagatttgtgaccattagcatttgtcaacaaagtcacccacttcccactattgcttgcacaaaccaattaaacccagtagtggtgactgtgggctccattcaaagtgagctcctaagccatgggagacactgatgtatgaggaatttctgttcttccatcacctccccccccccgccaccctcccactgccaagaacttggaaatagtgatttccacagtgactccactctgagtcccagagccaatcagtagccagcatctgcctccccttcactcccaccgcaggatttgggctcttggaatcctggggaacatagaactcatgacggaagagttgagacctaacgagaaatagaaatgggggaactactgctggcagtggaactaagaaagcccttaggaagaatttttatatccactaaaatcaaacaattcagggagtgggctaagcacgggccatatgaataacatggtgtgcttcttaaaatagccataaaggggagggactcatcatttccatttacccttcttttctgactatttttcagaatctctcttcttttcaagttgggtgatatgttggtagattctaatggctttattgcagcgattaataacaggcaaaaggaagcagggttggtttcccttctttttgttcttcatctaagccttctggttttatgggtcagagttccgactgccatcttggacttgtcagcaaaaaaaaaaaaaaaaa

SEQ ID NO: 62 - protein, 355 aa, Homo sapiens
METPNTTEDYDTTTEFDYGDATPCQKVNERAFGAQLLPPLYSLVFVIGLVGNILVVLVLVQYKRLKNMTSIYLLNLAISDLLFLFTLPFWIDYKLKDDWVFGDAMCKILSGFYYTGLYSEIFFIILLTIDRYLAIVHAVFALRARTVTFGVITSIIIWALAILASMPGLYFSKTQWEFTHHTCSLHFPHESLREWKLFQALKLNLFGLVLPLLVMIICYTGIIKILLRRPNEKKSKAVRLIFVIMIIFFLFWTPYNLTILISVFQDFLFTHECEQSRHLDLAVQVTEVIAYTHCCVNPVIYAFVGERFRKYLRQLFHRRVAVHLVKWLPFLSVDRLERVSSTSPSTGEHELSAGF

SEQ ID NO: 63 - DNA, 1201 bp, Homo sapiens
tttttcttcttctatcacagggagaagtgaaatgacaacctcactagatacagttgagacctttggtaccacatcctactatgatgacgtgggcctgctctgtgaaaaagctgataccagagcactgatggcccagtttgtgcccccgctgtactccctggtgttcactgtgggcctcttgggcaatgtggtggtggtgatgatcctcataaaatacaggaggctccgaattatgaccaacatctacctgctcaacctggccatttcggacctgctcttcctcgtcacccttccattctggatccactatgtcagggggcataactgggtttttggccatggcatgtgtaagctcctctcagggttttatcacacaggcttgtacagcgagatctttttcataatcctgctgacaatcgacaggtacctggccattgtccatgctgtgtttgcccttcgagcccggactgtcacttttggtgtcatcaccagcatcgtcacctggggcctggcagtgctagcagctcttcctgaatttatcttctatgagactgaagagttgtttgaagagactctttgcagtgctctttacccagaggatacagtatatagctggaggcatttccacactctgagaatgaccatcttctgtctcgttctccctctgctcgttatggccatctgctacacaggaatcatcaaaacgctgctgaggtgccccagtaaaaaaaagtacaaggccatccggctcatttttgtcatcatggcggtgtttttcattttctggacaccctacaatgtggctatccttctctcttcctatcaatccatcttatttggaaatgactgtgagcggagcaagcatctggacctggtcatgctggtgacagaggtgatcgcctactcccactgctgcatgaacccggtgatctacgcctttgttggagagaggttccggaagtacctgcgccacttcttccacaggcacttgctcatgcacctgggcagatacatcccattccttcctagtgagaagctggaaagaaccagctctgtctctccatccacagcagagccggaactctctattgtgttttaggtcagatgcagaaaattgcctaaagaggaaggaccaaggagatgaagcaaacacattaagccttccacactcacctctaaaacagtccttcaaacttccagt

SEQ ID NO: 64 - protein, 355 aa, Homo sapiens
MTTSLDTVETFGTTSYYDDVGLLCEKADTRALMAQFVPPLYSLVFTVGLLGNVVVVMILIKYRRLRIMTNIYLLNLAISDLLFLVTLPFWIHYVRGHNWVFGHGMCKLLSGFYHTGLYSEIFFIILLTIDRYLAIVHAVFALRARTVTFGVITSIVTWGLAVLAALPEFIFYETEELFEETLCSALYPEDTVYSWRHFHTLRMTIFCLVLPLLVMAICYTGIIKTLLRCPSKKKYKAIRLIFVIMAVFFIFWTPYNVAILLSSYQSILFGNDCERSKHLDLVMLVTEVIAYSHCCMNPVIYAFVGERFRKYLRHFFHRHLLMHLGRYIPFLPSEKLERTSSVSPSTAEPELSIVF

SEQ ID NO: 65 - DNA, 1677 bp, Homo sapiens
cgggggttttgatcttcttccccttcttttcttccccttcttctttccttcctccctccctctctcatttcccttctccttctccctcagtctccacattcaacattgacaagtccattcagaaaagcaagctgcttctggttgggcccagacctgccttgaggagcctgtagagttaaaaaatgaaccccacggatatagcagataccaccctcgatgaaagcatatacagcaattactatctgtatgaaagtatccccaagccttgcaccaaagaaggcatcaaggcatttggggagctcttcctgcccccactgtattccttggtttttgtatttggtctgcttggaaattctgtggtggttctggtcctgttcaaatacaagcggctcaggtccatgactgatgtgtacctgctcaaccttgccatctcggatctgctcttcgtgttttccctccctttttggggctactatgcagcagaccagtgggtttttgggctaggtctgtgcaagatgatttcctggatgtacttggtgggcttttacagtggcatattctttgtcatgctcatgagcattgatagatacctggcgatagtgcacgcggtgttttccttgagggcaaggaccttgacttatggggtcatcaccagtttggctacatggtcagtggctgtgttcgcctcccttcctggctttctgttcagcacttgttatactgagcgcaaccatacctactgcaaaaccaagtactctctcaactccacgacgtggaaggttctcagctccctggaaatcaacattctcggattggtgatccccttagggatcatgctgttttgctactccatgatcatcaggaccttgcagcattgtaaaaatgagaagaagaacaaggcggtgaagatgatctttgccgtggtggtcctcttccttgggttctggacaccttacaacatagtgctcttcctagagaccctggtggagctagaagtccttcaggactgcacctttgaaagatacttggactatgccatccaggccacagaaactctggcttttgttcactgctgccttaatcccatcatctacttttttctgggggagaaatttcgcaagtacatcctacagctcttcaaaacctgcaggggcctttttgtgctctgccaatactgtgggctcctccaaatttactctgctgacacccccagctcatcttacacgcagtccaccatggatcatgatcttcatgatgctctgtaggaaaaatgaaatggtgaaatgcagagtcaatgaacttttccacattcagagcttactttaaaattggtatttttaggtaagagatccctgagccagtgtcaggaggaaggcttacacccacagtggaaagacagcttctcatcctgcaggcagctttttctctcccactagacaagtccagcctggcaagggttcacctgggctgaggcatccttcctcacaccaggcttgcctgcaggcatgagtcagtctgatgagaactctgagcagtgcttgaatgaagttgtaggtaatattgcaaggcaaagactattcccttctaacctgaactgatgggtttctccagagggaattgcagagtactggctgatggagtaaatcgctaccttttgctgtggcaaatgggcccccg

SEQ ID NO: 66 - protein, 360 aa, Homo sapiens
MNPTDIADTTLDESIYSNYYLYESIPKPCTKEGIKAFGELFLPPLYSLVFVFGLLGNSVVVLVLFKYKRLRSMTDVYLLNLAISDLLFVFSLPFWGYYAADQWVFGLGLCKMISWMYLVGFYSGIFFVMLMSIDRYLAIVHAVFSLRARTLTYGVITSLATWSVAVFASLPGFLFSTCYTERNHTYCKTKYSLNSTTWKVLSSLEINILGLVIPLGIMLFCYSMIIRTLQHCKNEKKNKAVKMIFAVVVLFLGFWTPYNIVLFLETLVELEVLQDCTFERYLDYAIQATETLAFVHCCLNPIIYFFLGEKFRKYILQLFKTCRGLFVLCQYCGLLQIYSADTPSSSYTQSTMDHDLHDAL

SEQ ID NO: 67 - DNA, 2139 bp, Homo sapiens
gtgagacaggggtagtgcgaggccgggcacagccttcctgtgtggttttaccgcccagagagcgtcatggacctggggaaaccaatgaaaagcgtgctggtggtggctctccttgtcattttccaggtatgcctgtgtcaagatgaggtcacggacgattacatcggagacaacaccacagtggactacactttgttcgagtctttgtgctccaagaaggacgtgcggaactttaaagcctggttcctccctatcatgtactccatcatttgtttcgtgggcctactgggcaatgggctggtcgtgttgacctatatctatttcaagaggctcaagaccatgaccgatacctacctgctcaacctggcggtggcagacatcctcttcctcctgacccttcccttctgggcctacagcgcggccaagtcctgggtcttcggtgtccacttttgcaagctcatctttgccatctacaagatgagcttcttcagtggcatgctcctacttctttgcatcagcattgaccgctacgtggccatcgtccaggctgtctcagctcaccgccaccgtgcccgcgtccttctcatcagcaagctgtcctgtgtgggcatctggatactagccacagtgctctccatcccagagctcctgtacagtgacctccagaggagcagcagtgagcaagcgatgcgatgctctctcatcacagagcatgtggaggcctttatcaccatccaggtggcccagatggtgatcggctttctggtccccctgctggccatgagcttctgttaccttgtcatcatccgcaccctgctccaggcacgcaactttgagcgcaacaaggccatcaaggtgatcatcgctgtggtcgtggtcttcatagtcttccagctgccctacaatggggtggtcctggcccagacggtggccaacttcaacatcaccagtagcacctgtgagctcagtaagcaactcaacatcgcctacgacgtcacctacagcctggcctgcgtccgctgctgcgtcaaccctttcttgtacgccttcatcggcgtcaagttccgcaacgatctcttcaagctcttcaaggacctgggctgcctcagccaggagcagctccggcagtggtcttcctgtcggcacatccggcgctcctccatgagtgtggaggccgagaccaccaccaccttctccccataggcgactcttctgcctggactagagggacctctcccagggtccctggggtggggatagggagcagatgcaatgactcaggacatccccccgccaaaagctgctcagggaaaagcagctctcccctcagagtgcaagccctgctccagaagttagcttcaccccaatcccagctacctcaaccaatgccgaaaaagacagggctgataagctaacaccagacagacaacactgggaaacagaggctattgtcccctaaaccaaaaactgaaagtgaaagtccagaaactgttcccacctgctggagtgaaggggccaaggagggtgagtgcaaggggcgtgggagtggcctgaagagtcctctgaatgaaccttctggcctcccacagactcaaatgctcagaccagctcttccgaaaaccaggccttatctccaagaccagagatagtggggagacttcttggcttggtgaggaaaagcggacatcagctggtcaaacaaactctctgaacccctccctccatcgttttcttcactgtcctccaagccagcgggaatggcagctgccacgccgccctaaaagcacactcatcccctcacttgccgcgtcgccctcccaggctctcaacaggggagagtgtggtgtttcctgcaggccaggccagctgcctccgcgtgatcaaagccacactctgggctccagagtggggatgacatgcactcagctcttggctccactgggatgggaggagaggacaagggaaatgtcaggggcggggagggtgacagtggccgcccaaggccacgagcttgttctttgttctttgtcacagggactgaaaacctctcctcatgttctgctttcgattcgttaagagagcaacattttacccacacacagataaagttttcccttgaggaaacaacagctttaaaag

SEQ ID NO: 68 - protein, 378 aa, Homo sapiens
MDLGKPMKSVLVVALLVIFQVCLCQDEVTDDYIGDNTTVDYTLFESLCSKKDVRNFKAWFLPIMYSIICFVGLLGNGLVVLTYIYFKRLKTMTDTYLLNLAVADILFLLTLPFWAYSAAKSWVFGVHFCKLIFAIYKMSFFSGMLLLLCISIDRYVAIVQAVSAHRHRARVLLISKLSCVGIWILATVLSIPELLYSDLQRSSSEQAMRCSLITEHVEAFITIQVAQMVIGFLVPLLAMSFCYLVIIRTLLQARNFERNKAIKVIIAVVVVFIVFQLPYNGVVLAQTVANFNITSSTCELSKQLNIAYDVTYSLACVRCCVNPFLYAFIGVKFRNDLFKLFKDLGCLSQEQLRQWSSCRHIRRSSMSVEAETTTTFSP

SEQ ID NO: 69 - DNA, 530 bp, Homo sapiens
tttaaatttaaaaactttattggaatagcatgttagcagcagtgaacagggcatggcacagaaggtttccaaaacaagtttagcatgaaggatgccatatgctgttgccaacaactagaacacggtgactaaagacacagttctgaatgtccagcacaacctctggcctgcaactatgttcagtgatgatgataaacaaggtggtgacttggaaggaatccctatgtcaagtgagaaaaaaaaatgatgtctgacctccttatatatgtaaaaaatataccttcagagtccgtcagtaagctggaagaagtggatgttgaagtttttaacatcgatgatgggtctccagttgttcatcaacccatggtgaaatagctgaacggttctgaatcaaaggtgatcctaatagtgaagacattaacattgcagaaaaagtgcctacagattatatggtgaaaatacgtgatgggcttcttgaaggactagagcagtgtgtattcaaaacagaacaagaaatcacgtcagtttat

SEQ ID NO: 70 - DNA, 385 bp, Homo sapiens
tgccaaatatgctgttgccaacacttagaacacaatgactggagacacagttgtgcgtgcctggcacaacctccagcctgtgtctatgttcagtgatgatgatgagcaaggtggtgactttgaaggattttgtatatcaagtgaaaagaaatgatatctgacctccttacatatctaaaacatataccttcaaaatccatcaataagctgaaagaaatagatatcaaagaatattttaacatcattaatgaggctccagttattcattcattgaccaatggtaatatagctgaaatgattctgaatcaagctgattatgataatagtgatgatgaagatgatgttaatactgcagaaaaagtgcctataaatgacacagtgaaaa

SEQ ID NO: 71 - DNA, 2370 bp, Homo sapiens
ctccagagaggctgctgctcattgagctgcactcacatgaggatacagactttgtgaagaaggaattggcaacactgaaacctccagaacaaaggctgtcactaaggtcccgctgccttgatggattatacacttgacctcagtgtgacaacagtgaccgactactactaccctgatatcttctcaagcccctgtgatgcggaacttattcagacaaatggcaagttgctccttgctgtcttttattgcctcctgtttgtattcagtcttctgggaaacagcctggtcatcctggtccttgtggtctgcaagaagctgaggagcatcacagatgtatacctcttgaacctggccctgtctgacctgctttttgtcttctccttcccctttcagacctactatctgctggaccagtgggtgtttgggactgtaatgtgcaaagtggtgtctggcttttattacattggcttctacagcagcatgtttttcatcaccctcatgagtgtggacaggtacctggctgttgtccatgccgtgtatgccctaaaggtgaggacgatcaggatgggcacaacgctgtgcctggcagtatggctaaccgccattatggctaccatcccattgctagtgttttaccaagtggcctctgaagatggtgttctacagtgttattcattttacaatcaacagactttgaagtggaagatcttcaccaacttcaaaatgaacattttaggcttgttgatcccattcaccatctttatgttctgctacattaaaatcctgcaccagctgaagaggtgtcaaaaccacaacaagaccaaggccatcaggttggtgctcattgtggtcattgcatctttacttttctgggtcccattcaacgtggttcttttcctcacttccttgcacagtatgcacatcttggatggatgtagcataagccaacagctgacttatgccacccatgtcacagaaatcatttcctttactcactgctgtgtgaaccctgttatctatgcttttgttggggagaagttcaagaaacacctctcagaaatatttcagaaaagttgcagccaaatcttcaactacctaggaagacaaatgcctagggagagctgtgaaaagtcatcatcctgccagcagcactcctcccgttcctccagcgtagactacattttgtgaggatcaatgaagactaaatataaaaaacattttcttgaatggcatgctagtagcagtgagcaaaggtgtgggtgtgaaaggtttccaaaaaaagttcagcatgaaggatgccatatatgttgttgccaacacttaaaacacaatgactggagacatagttgtgcatgcctggcacaacatcaagcctgtgattgtgtttattgatgatgttgaacaagtggtaactttaaaggattctgtatgccaagtgaaaaaaaaagatgtctgacctccttcatatgcaaaaatataccttcagagactgtcagtaggctggaagaagtggatattgaagttttgacatcaatgatgaggctccagttgtctatgcattgactgatggtgaaatggctggagtgattctgaatcaaggtgattgtgattatagtgacaatgaagatgatgctattaatactgcataaaaagtgcctgtagatgacatggtgaaaatatttgacaggcttatggaaggactacagcagcacgcattcataacagaacaagaaattatctcagcttataaaatcaaacagagacttctagacaaaaaccattgttgatgaggcagatgcctctagaagagacgtttaaaagccatcaaacacaatgcctcatcttccctggaggacccacttcctgatccctcaactgtgtctgatgtttcttctcatgtaagaaataaaaaataaaaataaaaaaatatatattggtatgtaactacaggaaaaaaataaaaaatatatagtggacagtaacctttcaatcaaaactcagtatcataagtagagactgaaaacttgccgttattgattgttgttattaacagctgatacaggtattctgctgatgctactgctgcctagttaccatgaacacgttttttcactattaatggtgcgtcatattttttacttttaagtacttacgtgtgagtaagtgtaagaaaatgattgcttatcagtagtatcaatgatttactcaatatctgaatcaccttgattcagaaccatttcagctgtttcaccatcagtcaatgaataacagcctcattgatgtcaaaaacttcaatatccacttctttcagcctactgtagactctggaagtatactttttgcatatgtaaggaagtcagattttttttt

SEQ ID NO: 72 - protein, 355 aa, Homo sapiens
MDYTLDLSVTTVTDYYYPDIFSSPCDAELIQTNGKLLLAVFYCLLFVFSLLGNSLVILVLVVCKKLRSITDVYLLNLALSDLLFVFSFPFQTYYLLDQWVFGTVMCKVVSGFYYIGFYSSMFFITLMSVDRYLAVVHAVYALKVRTIRMGTTLCLAVWLTAIMATIPLLVFYQVASEDGVLQCYSFYNQQTLKWKIFTNFKMNILGLLIPFTIFMFCYIKILHQLKRCQNHNKTKAIRLVLIVVIASLLFWVPFNVVLFLTSLHSMHILDGCSISQQLTYATHVTEIISFTHCCVNPVIYAFVGEKFKKHLSEIFQKSCSQIFNYLGRQMPRESCEKSSSCQQHSSRSSSVDYIL

SEQ ID NO: 73 - DNA, 1670 bp, Homo sapiens
ccaaccacaagcaccaaagcagaggggcaggcagcacaccacccagcagccagagcaccagcccagccatggtccttgaggtgagtgaccaccaagtgctaaatgacgccgaggttgccgccctcctggagaacttcagctcttcctatgactatggagaaaacgagagtgactcgtgctgtacctccccgccctgcccacaggacttcagcctgaacttcgaccgggccttcctgccagccctctacagcctcctctttctgctggggctgctgggcaacggcgcggtggcagccgtgctgctgagccggcggacagccctgagcagcaccgacaccttcctgctccacctagctgtagcagacacgctgctggtgctgacactgccgctctgggcagtggacgctgccgtccagtgggtctttggctctggcctctgcaaagtggcaggtgccctcttcaacatcaacttctacgcaggagccctcctgctggcctgcatcagctttgaccgctacctgaacatagttcatgccacccagctctaccgccgggggcccccggcccgcgtgaccctcacctgcctggctgtctgggggctctgcctgcttttcgccctcccagacttcatcttcctgtcggcccaccacgacgagcgcctcaacgccacccactgccaatacaacttcccacaggtgggccgcacggctctgcgggtgctgcagctggtggctggctttctgctgcccctgctggtcatggcctactgctatgcccacatcctggccgtgctgctggtttccaggggccagcggcgcctgcgggccatgcggctggtggtggtggtcgtggtggcctttgccctctgctggaccccctatcacctggtggtgctggtggacatcctcatggacctgggcgctttggcccgcaactgtggccgagaaagcagggtagacgtggccaagtcggtcacctcaggcctgggctacatgcactgctgcctcaacccgctgctctatgcctttgtaggggtcaagttccgggagcggatgtggatgctgctcttgcgcctgggctgccccaaccagagagggctccagaggcagccatcgtcttcccgccgggattcatcctggtctgagacctcagaggcctcctactcgggcttgtgaggccggaatccgggctcccctttcgcccacagtctgacttccccgcattccaggctcctccctccctctgccggctctggctctccccaatatcctcgctcccgggactcactggcagccccagcaccaccaggtctcccgggaagccaccctcccagctctgaggactgcaccattgctgctccttagctgccaagccccatcctgccgcccgaggtggctgcctggagccccactgcccttctcatttggaaactaaaacttcatcttccccaagtgcggggagtacaaggcatggcgtagagggtgctgccccatgaagccacagcccaggcctccagctcagcagtgactgtggccatggtccccaagacctctatatttgctcttttatttttatgtctaaaatcctgcttaaaacttttcaataaacaagatcgtcaggaccaaaaaaaaaaaaaaaaaaaaaaaaaaaaaaaaaaaaaaaaaaaaaaa

SEQ ID NO: 74 - protein, 368 aa, Homo sapiens
MVLEVSDHQVLNDAEVAALLENFSSSYDYGENESDSCCTSPPCPQDFSLNFDRAFLPALYSLLFLLGLLGNGAVAAVLLSRRTALSSTDTFLLHLAVADTLLVLTLPLWAVDAAVQWVFGSGLCKVAGALFNINFYAGALLLACISFDRYLNIVHATQLYRRGPPARVTLTCLAVWGLCLLFALPDFIFLSAHHDERLNATHCQYNFPQVGRTALRVLQLVAGFLLPLLVMAYCYAHILAVLLVSRGQRRLRAMRLVVVVVVAFALCWTPYHLVVLVDILMDLGALARNCGRESRVDVAKSVTSGLGYMHCCLNPLLYAFVGVKFRERMWMLLLRLGCPNQRGLQRQPSSSRRDSSWSETSEASYSGL

SEQ ID NO: 75 - DNA, 1679 bp, Homo sapiens
gtttgttggctgcggcagcaggtagcaaagtgacgccgagggcctgagtgctccagtagccaccgcatctggagaaccagcggttaccatggaggggatcagtatatacacttcagataactacaccgaggaaatgggctcaggggactatgactccatgaaggaaccctgtttccgtgaagaaaatgctaatttcaataaaatcttcctgcccaccatctactccatcatcttcttaactggcattgtgggcaatggattggtcatcctggtcatgggttaccagaagaaactgagaagcatgacggacaagtacaggctgcacctgtcagtggccgacctcctctttgtcatcacgcttcccttctgggcagttgatgccgtggcaaactggtactttgggaacttcctatgcaaggcagtccatgtcatctacacagtcaacctctacagcagtgtcctcatcctggccttcatcagtctggaccgctacctggccatcgtccacgccaccaacagtcagaggccaaggaagctgttggctgaaaaggtggtctatgttggcgtctggatccctgccctcctgctgactattcccgacttcatctttgccaacgtcagtgaggcagatgacagatatatctgtgaccgcttctaccccaatgacttgtgggtggttgtgttccagtttcagcacatcatggttggccttatcctgcctggtattgtcatcctgtcctgctattgcattatcatctccaagctgtcacactccaagggccaccagaagcgcaaggccctcaagaccacagtcatcctcatcctggctttcttcgcctgttggctgccttactacattgggatcagcatcgactccttcatcctcctggaaatcatcaagcaagggtgtgagtttgagaacactgtgcacaagtggatttccatcaccgaggccctagctttcttccactgttgtctgaaccccatcctctatgctttccttggagccaaatttaaaacctctgcccagcacgcactcacctctgtgagcagagggtccagcctcaagatcctctccaaaggaaagcgaggtggacattcatctgtttccactgagtctgagtcttcaagttttcactccagctaacacagatgtaaaagacttttttttatacgataaataacttttttttaagttacacatttttcagatataaaagactgaccaatattgtacagtttttattgcttgttggatttttgtcttgtgtttctttagtttttgtgaagtttaattgacttatttatataaattttttttgtttcatattgatgtgtgtctaggcaggacctgtggccaagttcttagttgctgtatgtctcgtggtaggactgtagaaaagggaactgaacattccagagcgtgtagtgaatcacgtaaagctagaaatgatccccagctgtttatgcatagataatctctccattcccgtggaacgtttttcctgttcttaagacgtgattttgctgtagaagatggcacttataaccaaagcccaaagtggtatagaaatgctggtttttcagttttcaggagtgggttgatttcagcacctacagtgtacagtcttgtattaagttgttaataaaagtacatgttaaacttacttagtgttatg

SEQ ID NO: 76 - protein, 352 aa, Homo sapiens
MEGISIYTSDNYTEEMGSGDYDSMKEPCFREENANFNKIFLPTIYSIIFLTGIVGNGLVILVMGYQKKLRSMTDKYRLHLSVADLLFVITLPFWAVDAVANWYFGNFLCKAVHVIYTVNLYSSVLILAFISLDRYLAIVHATNSQRPRKLLAEKVVYVGVWIPALLLTIPDFIFANVSEADDRYICDRFYPNDLWVVVFQFQHIMVGLILPGIVILSCYCIIISKLSHSKGHQKRKALKTTVILILAFFACWLPYYIGISIDSFILLEIIKQGCEFENTVHKWISITEALAFFHCCLNPILYAFLGAKFKTSAQHALTSVSRGSSLKILSKGKRGGHSSVSTESESSSFHSS

SEQ ID NO: 77 - DNA, 1449 bp, Homo sapiens
atggcgtctttctctgctgagaccaattcaactgacctactctcacagccatggaatgagcccccagtaattctctccatggtcattctcagccttacttttttactgggattgccaggcaatgggctggtgctgtgggtggctggcctgaagatgcagcggacagtgaacacaatttggttcctccacctcaccttggcggacctcctctgctgcctctccttgcccttctcgctggctcacttggctctccagggacagtggccctacggcaggttcctatgcaagctcatcccctccatcattgtcctcaacatgtttgccagtgtcttcctgcttactgccattagcctggatcgctgtcttgtggtattcaagccaatctggtgtcagaatcatcgcaatgtagggatggcctgctctatctgtggatgtatctgggtggtggcttttgtgatgtgcattcctgtgttcgtgtaccgggaaatcttcactacagacaaccataatagatgtggctacaaatttggtctctccagctcattagattatccagacttttatggagatccactagaaaacaggtctcttgaaaacattgttcagccgcctggagaaatgaatgataggttagatccttcctctttccaaacaaatgatcatccttggacagtccccactgtcttccaacctcaaacatttcaaagaccttctgcagattcactccctaggggttctgctaggttaacaagtcaaaatctgtattctaatgtatttaaacctgctgatgtggtctcacctaaaatccccagtgggtttcctattgaagatcacgaaaccagcccactggataactctgatgcttttctctctactcatttaaagctgttccctagcgcttctagcaattccttctacgagtctgagctaccacaaggtttccaggattattacaatttaggccaattcacagatgacgatcaagtgccaacacccctcgtggcaataacgatcactaggctagtggtgggtttcctgctgccctctgttatcatgatagcctgttacagcttcattgtcttccgaatgcaaaggggccgcttcgccaagtctcagagcaaaacctttcgagtggccgtggtggtggtggctgtctttcttgtctgctggactccataccacatttttggagtcctgtcattgcttactgacccagaaactcccttggggaaaactctgatgtcctgggatcatgtatgcattgctctagcatctgccaatagttgctttaatcccttcctttatgccctcttggggaaagattttaggaagaaagcaaggcagtccattcagggaattctggaggcagccttcagtgaggagctcacacgttccacccactgtccctcaaacaatgtcatttcagaaagaaatagtacaactgtgtga

SEQ ID NO: 78 - protein, 482 aa, Homo sapiens
MASFSAETNSTDLLSQPWNEPPVILSMVILSLTFLLGLPGNGLVLWVAGLKMQRTVNTIWFLHLTLADLLCCLSLPFSLAHLALQGQWPYGRFLCKLIPSIIVLNMFASVFLLTAISLDRCLVVFKPIWCQNHRNVGMACSICGCIWVVAFVMCIPVFVYREIFTTDNHNRCGYKFGLSSSLDYPDFYGDPLENRSLENIVQPPGEMNDRLDPSSFQTNDHPWTVPTVFQPQTFQRPSADSLPRGSARLTSQNLYSNVFKPADVVSPKIPSGFPIEDHETSPLDNSDAFLSTHLKLFPSASSNSFYESELPQGFQDYYNLGQFTDDDQVPTPLVAITITRLVVGFLLPSVIMIACYSFIVFRMQRGRFAKSQSKTFRVAVVVVAVFLVCWTPYHIFGVLSLLTDPETPLGKTLMSWDHVCIALASANSCFNPFLYALLGKDFRKKARQSIQGILEAAFSEELTRSTHCPSNNVISERNSTTV

SEQ ID NO: 79 - DNA, 2328 bp, Homo sapiens
agggggagcccaggagaccagaacatgaactccttcaattataccacccctgattatgggcactatgatgacaaggataccctggacctcaacacccctgtggataaaacttctaacacgctgcgtgttccagacatcctggccttggtcatctttgcagtcgtcttcctggtgggagtgctgggcaatgccctggtggtctgggtgacggcattcgaggccaagcggaccatcaatgccatctggttcctcaacttggcggtagccgacttcctctcctgcctggcgctgcccatcttgttcacgtccattgtacagcatcaccactggccctttggcggggccgcctgcagcatcctgccctccctcatcctgctcaacatgtacgccagcatcctgctcctggccaccatcagcgccgaccgctttctgctggtgtttaaacccatctggtgccagaacttccgaggggccggcttggcctggatcgcctgtgccgtggcttggggtttagccctgctgctgaccataccctccttcctgtaccgggtggtccgggaggagtactttccaccaaaggtgttgtgtggcgtggactacagccacgacaaacggcgggagcgagccgtggccatcgtccggctggtcctgggcttcctgtggcctctactcacgctcacgatttgttacactttcatcctgctccggacgtggagccgcagggccacgcggtccaccaagacactcaaggtggtggtggcagtggtggccagtttctttatcttctggttgccctaccaggtgacggggataatgatgtccttcctggagccatcgtcacccaccttcctgctgctgaataagctggactccctgtgtgtctcctttgcctacatcaactgctgcatcaaccccatcatctacgtggtggccggccagggcttccagggccgactgcggaaatccctccccagcctcctccggaacgtgttgactgaagagtccgtggttagggagagcaagtcattcacgcgctccacagtggacactatggcccagaagacccaggcagtgtaggcgacagcctcatgggccactgtggcccgatgtccccttccttcccggccattctccctcttgttttcacttcacttttcgtgggatggtgttaccttagctaactaactctcctccatgttgcctgtctttcccagacttgtccctccttttccagcgggactcttctcatccttcctcatttgcaaggtgaacacttccttctagggagcaccctcccaccccccacccccccccacacaccatctttccatcccaggcttttgaaaaacaaacagaaacccgtgtatctgggatatttccatatggcaataggtgtgaacagggaactcagaatacagacaagtagaaagattctcgcttaaaaaaatgtatttattttatggcaagttggaaaatatgtaactggaatctcaaaagttctttgggacaaaacagaagtccatggagttatctaagctcttgtaagtgagttaatttaaaaaagaaaattaggctgagagcagtggctcacgcctgtaatcccagaactttgggaggctaaggtgggtggatcacctgaggtcaagagttccagaccaggctggccagcatggtgaaaccccgtctgtactaaaaatacaaaaaattaactgggcatggtagtgggtgcctgtaatcccagctacttgggaggctgaggtgggagaattgctcgaaccttggaggtggaggttgtggtgagccatgatcgcaccactgcactctagcctgggtgaccgagggaggctctgtctcaaaagcaaagcaaaaacaaaaacaaaaacacctaaaaaacctgcagttttgtttgtactttgtttttaaattatgctttctattttgagatcattgcaaactcaacacaattgtaagtaatgatacagagggatcttgtgtacccttcacccagcctcccccaatggcaacatcttgcaaaactacaatgtagtctcataaccaggatattgacattgatacagtgaagatacaggacattctcatcaccacagggatccccaggatgcccacttccctccacccccacaccccagccgtgtccctaacccctggcaaccaggaatccactctccatttctataatgttgtcatttcaagaatgttattcaatggaatcatatagtatgtaacctgttttgagcttaaaaaaaaaagtatacatgactttaatgaggaaaataaaaatgaatattgaaaaaaaaaactttagag

SEQ ID NO: 80 - protein, 350 aa, Homo sapiens
MNSFNYTTPDYGHYDDKDTLDLNTPVDKTSNTLRVPDILALVIFAVVFLVGVLGNALVVWVTAFEAKRTINAIWFLNLAVADFLSCLALPILFTSIVQHHHWPFGGAACSILPSLILLNMYASILLLATISADRFLLVFKPIWCQNFRGAGLAWIACAVAWGLALLLTIPSFLYRVVREEYFPPKVLCGVDYSHDKRRERAVAIVRLVLGFLWPLLTLTICYTFILLRTWSRRATRSTKTLKVVVAVVASFFIFWLPYQVTGIMMSFLEPSSPTFLLLNKLDSLCVSFAYINCCINPIIYVVAGQGFQGRLRKSLPSLLRNVLTEESVVRESKSFTRSTVDTMAQKTQAV

SEQ ID NO: 81 - DNA, 3018 bp, Homo sapiens
gcacgagggaacaacctctctctctscagcagagagtgtcacctcctgctttaggaccatcaagctctgctaactgaatctcatcctaattgcaggatcacattgcaaagctttcactctttcccaccttgcttgtgggtaaatctcttctgcggaatctcagaaagtaaagttccatcctgagaatatttcacaaagaatttccttaagagctggactgggtcttgacccctggaatttaagaaattcttaaagacaatgtcaaatatgatccaagagaaaatgtgatttgagtctggagacaattgtgcatatcgtctaataataaaaacccatactagcctatagaaaacaatatttgaataataaaaacccatactagcctatagaaaacaatatttgaaagattgctaccactaaaaagaaaactactacaacttgacaagactgctgcaaacttcaattggtcaccacaacttgacaaggttgctataaaacaagattgctacaacttctagtttatgttatacagcatatttcatttgggcttaatgatggagaaaaagtgtaccctgtattttctggttctcttgcctttttttatgattcttgttacagcagaattagaagagagtcctgaggactcaattcagttgggagttactagaaataaaatcatgacagctcaatatgaatgttaccaaaagattatgcaagaccccattcaacaagcagaaggcgtttactgcaacagaacctgggatggatggctctgctggaacgatgttgcagcaggaactgaatcaatgcagctctgccctgattactttcaggactttgatccatcagaaaaagttacaaagatctgtgaccaagatggaaactggtttagacatccagcaagcaacagaacatggacaaattatacccagtgtaatgttaacacccacgagaaagtgaagactgcactaaatttgttttacctgaccataattggacacggattgtctattgcatcactgcttatctcgcttggcatattcttttatttcaagagcctaagttgccaaaggattaccttacacaaaaatctgttcttctcatttgtttgtaactctgttgtaacaatcattcacctcactgcagtggccaacaaccaggccttagtagccacaaatcctgttagttgcaaagtgtcccagttcattcatctttacctgatgggctgtaattacttttggatgctctgtgaaggcatttacctacacacactcattgtggtggccgtgtttgcagagaagcaacatttaatgtggtattattttcttggctggggatttccactgattcctgcttgtatacatgccattgctagaagcttatattacaatgacaattgctggatcagttctgatacccatctcctctacattatccatggcccaatttgtgctgctttactggtgaatctttttttcttgttaaatattgtacgcgttctcatcaccaagttaaaagttacacaccaagcggaatccaatctgtacatgaaagctgtgagagctactcttatcttggtgccattgcttggcattgaatttgtgctgattccatggcgacctgaaggaaagattgcagaggaggtatatgactacatcatgcacatccttatgcacttccagggtcttttggtctctaccattttctgcttctttaatggagaggttcaagcaattctgagaagaaactggaatcaatacaaaatccaatttggaaacagcttttccaactcagaagctcttcgtagtgcgtcttacacagtgtcaacaatcagtgatggtccaggttatagtcatgactgtcctagtgaacacttaaatggaaaaagcatccatgatattgaaaatgttctcttaaaaccagaaaatttatataattgaaaatagaaggatggttgtctcactgtttggtgcttctcctaactcaaggacttggacccatgactctgtagccagaagacttcaatattaaatgactttggggaatgtcataaagaagagccttcacatgaaattagtagtgtgttgataagagtgtaacatccagctctatgtgggaaaaaagaaatcctggtttgtaatgtttgtcagtaaatactcccactatgcctgatgtgacgctactaacctgacatcaccaagtgtggaattggagaaaagcacaatcaacttttctgagctggtgtaagccagttccagcacaccattgatgaattcaaacaaatggctgtaaaactaaacatacatgttgggcatgattctacccttattcsccccaagagacctagctaaggtctataaacatgaagggaaaattagcttttagttttaaaactctttatcccatcttgattggggcagttgactttttttttttcccagagtgccgtagtcctttttgtaactaccctctcaaatggacaataccagaagtgaattatccctgctggctttcttttctctatgaaaagcaactgagtacaattgttatgatctactcatttgctgacacatcagttatatcttgtggcatatccattgtggaaactggatgaacaggatgtataatatgcaatcttacttctatatcattaggaaaacatcttagttgatgctacaaaacaccttgtcaacctcttcctgtcttaccaaacagtgggagggaattcctagctgtaaatataaattttgcccttccatttctactgtataaacaaattagcaatcattttatataaagaaaatcaatgaaggatttcttattttcttggaattttgtaaaaagaaattgtgaaaaatgagcttgtaaatactccattattttattttatagtctcaaatcaaatacatacaacctatgtaatttttaaagcaaatatataatgcaacaatgtgtgtatgttaatatctgatactgtatctgggctgattttttaaataaaatagagtctggaatgct

SEQ ID NO: 82 - protein, 461 aa, Homo sapiens [sequence omitted]

SEQ ID NO: 83 - DNA, 1755 bp, Homo sapiens
ggggactacggagagctctgcagggagccgaggcccccgcccgggccaagggagcttctgtcccgaggaccaggggatgcgaagggattgccccctgtgggtcactttctcagtcattttgagctcagcctaatcaaagactgaggttatgaagtcgatcctagatggccttgcagataccaccttccgcaccatcaccactgacctcctgtacgtgggctcaaatgacattcagtacgaagacatcaaaggtgacatggcatccaaattagggtacttcccacagaaattccctttaacttcctttaggggaagtcccttccaagagaagatgactgcgggagacaacccccagctagtcccagcagaccaggtgaacattacagaattttacaacaagtctctctcgtccttcaaggagaatgaggagaacatccagtgtggggagaacttcatggacatagagtgtttcatggtcctgaaccccagccagcagctggccattgcagtcctgtccctcacgctgggcaccttcacggtcctggagaacctcctggtgctgtgcgtcatcctccactcccgcagcctccgctgcaggccttcctaccacttcatcggcagcctggcggtggcagacctcctggggagtgtcatttttgtctacagcttcattgacttccacgtgttccaccgcaaagatagccgcaacgtgtttctgttcaaactgggtggggtcacggcctccttcactgcctccgtgggcagcctgttcctcacagccatcgacaggtacatatccattcacaggcccctggcctataagaggattgtcaccaggcccaaggccgtggtggcgttttgcctgatgtggaccatagccattgtgatcgccgtgctgcctctcctgggctggaactgcgagaaactgcaatctgtttgctcagacattttcccacacattgatgaaacctacctgatgttctggatcggggtcaccagcgtactgcttctgttcatcgtgtatgcgtacatgtatattctctggaaggctcacagccacgccgtccgcatgattcagcgtggcacccagaagagcatcatcatccacacgtctgaggatgggaaggtacaggtgacccggccagaccaagcccgcatggacattaggttagccaagaccctggtcctgatcctggtggtgttgatcatctgctggggccctctgcttgcaatcatggtgtatgatgtctttgggaagatgaacaagctcattaagacggtgtttgcattctgcagtatgctctgcctgctgaactccaccgtgaaccccatcatctatgctctgaggagtaaggacctgcgacacgctttccggagcatgtttccctcttgtgaaggcactgcgcagcctctggataacagcatgggggactcggactgcctgcacaaacacgcaaacaatgcagccagtgttcacagggccgcagaaagctgcatcaagagcacggtcaagattgccaaggtaaccatgtctgtgtccacagacacgtctgccgaggctctgtgagcctgatgcctccctggcagcacaggaaaagaatttttttttttaagctcaaaatctagaagagtctattgtctccttggttatatttttttaactttaccatgctcaatgaaaaggtgattgccacatgtcacttatttgcttagtttccgtttgggctaatcttccggggttcgtaggaaaccttt

SEQ ID NO: 84 - protein, 472 aa, Homo sapiens
MKSILDGLADTTFRTITTDLLYVGSNDIQYEDIKGDMASKLGYFPQKFPLTSFRGSPFQEKMTAGDNPQLVPADQVNITEFYNKSLSSFKENEENIQCGENFMDIECFMVLNPSQQLAIAVLSLTLGTFTVLENLLVLCVILHSRSLRCRPSYHFIGSLAVADLLGSVIFVYSFIDFHVFHRKDSRNVFLFKLGGVTASFTASVGSLFLTAIDRYISIHRPLAYKRIVTRPKAVVAFCLMWTIAIVIAVLPLLGWNCEKLQSVCSDIFPHIDETYLMFWIGVTSVLLLFIVYAYMYILWKAHSHAVRMIQRGTQKSIIIHTSEDGKVQVTRPDQARMDIRLAKTLVLILVVLIICWGPLLAIMVYDVFGKMNKLIKTVFAFCSMLCLLNSTVNPIIYALRSKDLRHAFRSMFPSCEGTAQPLDNSMGDSDCLHKHANNAASVHRAAESCIKSTVKIAKVTMSVSTDTSAEAL

SEQ ID NO: 85 - DNA, 1776 bp, Homo sapiens
caggtcctgggagaggacagaaaacaactggactcctcagcccccggcagctcccagtgcccagccacccacaacacaacccaaagccttctagacaagctcagtggaatctgaagggcccaccccatggaggaatgctgggtgacagagatagccaatggctccaaggatggcttggattccaaccctatgaaggattacatgatcctgagtggtccccagaagacagctgttgctgtgttgtgcactcttctgggcctgctaagtgccctggagaacgtggctgtgctctatctgatcctgtcctcccaccaactccgccggaagccctcatacctgttcattggcagcttggctggggctgacttcctggccagtgtggtctttgcatgcagctttgtgaatttccatgttttccatggtgtggattccaaggctgtcttcctgctgaagattggcagcgtgactatgaccttcacagcctctgtgggtagcctcctgctgaccgccattgaccgatacctctgcctgcgctatccaccttcctacaaagctctgctcacccgtggaagggcactggtgaccctgggcatcatgtgggtcctctcagcactagtctcctacctgcccctcatgggatggacttgctgtcccaggccctgctctgagcttttcccactgatccccaatgactacctgctgagctggctcctgttcatcgccttcctcttttccggaatcatctacacctatgggcatgttctctggaaggcccatcagcatgtggccagcttgtctggccaccaggacaggcaggtgccaggaatggcccgaatgaggctggatgtgaggttggccaagaccctagggctagtgttggctgtgctcctcatctgttggttcccagtgctggccctcatggcccacagcctggccactacgctcagtgaccaggtcaagaaggcctttgctttctgctccatgctgtgcctcatcaactccatggtcaaccctgtcatctatgctctacggagtggagagatccgctcctctgcccatcactgcctggctcactggaagaagtgtgtgaggggccttgggtcagaggcaaaagaagaagccccgagatcctcagtcaccgagacagaggctgatgggaaaatcactccgtggccagattccagagatctagacctctctgattgctgatgaggcctcttcccaatttaaacaactcaagtcagaaatcagttcactccctggaagagagagaggggtcttggcactctcttcttacttaaaccagtcccagacacctagacacggacccctttttgctgatgagtgttgggactgactcctggaagacagcctggccttgcccacctgcacacagtctgttggataggtagggccacgaggagtagccaggtaggcgagacacaaaaaggcctgggacagggtcagtacaagtcaggacaggcttcatgcctgcatcctccagagaccaccaggagccaaagcgagcctccaggcccagcaatgagggacttgggagaaatctgagaagaatgggttgttctcttgggaagtcagggtatcagatgggatggacatccaggtcttctctctgcctaattgtcaaggcctccttggctctggagctatgaaaggccccactttcaagtcacccttgccactgaggaccgaggactatgctatgatgaggattaaggtgttgacttgcctctttcagagataaatgacaagccttca

SEQ ID NO: 86 - protein, 360 aa, Homo sapiens
MEECWVTEIANGSKDGLDSNPMKDYMILSGPQKTAVAVLCTLLGLLSALENVAVLYLILSSHQLRRKPSYLFIGSLAGADFLASVVFACSFVNFHVFHGVDSKAVFLLKIGSVTMTFTASVGSLLLTAIDRYLCLRYPPSYKALLTRGRALVTLGIMWVLSALVSYLPLMGWTCCPRPCSELFPLIPNDYLLSWLLFIAFLFSGIIYTYGHVLWKAHQHVASLSGHQDRQVPGMARMRLDVRLAKTLGLVLAVLLICWFPVLALMAHSLATTLSDQVKKAFAFCSMLCLINSMVNPVIYALRSGEIRSSAHHCLAHWKKCVRGLGSEAKEEAPRSSVTETEADGKITPWPDSRDLDLSDC

SEQ ID NO: 87 - DNA, 2921 bp, Homo sapiens
agcctgtggagacgggacagccctgtcccactcactctttcccctgccgctcctgccggcagctccaaccatgggaggccgcgtctttctcgcattctgtgtctggctgactctgccgggagctgaaacccaggactccaggggctgtgcccggtggtgccctcagaactcctcgtgtgtcaatgccaccgcctgtcgctgcaatccagggttcagctctttttctgagatcatcaccaccccgacggagacttgtgacgacatcaacgagtgtgcaacaccgtcgaaagtgtcatgcggaaaattctcggactgctggaacacagaggggagctacgactgcgtgtgcagcccgggatatgagcctgtttctggggcaaaaacattcaagaatgagagcgagaacacctgtcaagatgtggacgagtgcagctccgggcagcatcagtgtgacagctccaccgtctgcttcaacaccgtgggttcatacagctgccgctgccgcccaggctggaagcccagacacggaatcccgaataaccaaaaggacactgtctgtgaagatatgactttctccacctggaccccgccccctggagtccacagccagacgctttcccgattcttcgacaaagtccaggacctgggcagagactccaagacaagctcagccgaggtcaccatccagaatgtcatcaaattggtggatgaactgatggaagctcctggagacgtagaggccctggcgccacctgtccggcacctcatagccacccagctgctctcaaaccttgaagatatcatgaggatcctggccaagagcctgcctaaaggccccttcacctacatttccccttcgaacacagagctgaccctgatgatccaggagcggggggacaagaacgtcactatgggtcagagcagcgcacgcatgaagctgaattgggctgtggcagctggagccgaggatccaggccccgccgtggcgggcatcctctccatccagaacatgacgacattgctggccaatgcctccttgaacctgcattccaagaagcaagccgaactggaggagatatatgaaagcagcatccgtggtgtccaactcagacgcctctctgccgtcaactccatctttctgagccacaacaacaccaaggaactcaactcccccatccttttcgccttctcccaccttgagtcctccgatggggaggcgggaagagaccctcctgccaaggacgtgatgcctgggccacggcaggagctgctctgtgccttctggaagagtgacagcgacaggggagggcactgggccaccgaggtctgccaggtgctgggcagcaagaacggcagcaccacctgccaatgcagccacctgagcagctttacgatccttatggctcattatgacgtggaggactggaagctgaccctgatcaccagggtgggactggcgctgtcactcttctgcctgctgctgtgcatcctcactttcctgctggtgcggcccatccagggctcgcgcaccaccatacacctgcacctctgcatctgcctcttcgtgggctccaccatcttcctggccggcatcgagaacgaaggcggccaggtggggctgcgctgccgcctggtggccgggctgctgcactactgtttcctggccgccttctgctggatgagcctcgaaggcctggagctctactttcttgtggtgcgcgtgttccaaggccagggcctgagtacgcgctggctctgcctgatcggctatggcgtgcccctgctcatcgtgggcgtctcggctgccatctacagcaagggctacggccgccccagatactgctggttggactttgagcagggcttcctctggagcttcttgggacctgtgaccttcatcattttgtgcaatgctgtcattttcgtgactaccgtctggaagctcactcagaagttttctgaaatcaatccagacatgaagaaattaaagaaggcgagggcgctgaccatcacggccatcgcgcagctcttcctgttgggctgcacctgggtctttggcctgttcatcttcgacgatcggagcttggtgctgacctatgtgtttaccatcctcaactgcctgcagggcgccttcctctacctgctgcactgcctgctcaacaagaaggttcgggaagaataccggaagtgggcctgcctagttgctggggggagcaagtactcagaattcacctccaccacgtctggcactggccacaatcagacccgggccctcagggcatcagagtccggcatatgaaggcgcatggttctggacggcccagcagctcctgtggccacagcagctttgtacacgaagaccatccatcctcccttcgtccaccactctactccctccaccctccctccctgatcccgtgtgccaccaggagggagtggcagctatagtctggcaccaaagtccaggacacccagtggggtggagtcggagccactggtcctgctgctggctgcctctctgctccaccttgtgacccagggtggggacaggggctggcccagggctgcaatgcagcatgttgccctggcacctgtggccagtactcgggacagactaagggcgcttgtcccatcctggacttttcctctcatgtctttgctgcagaactgaagagactaggcgctggggctcagcttccctcttaagctaagactgatgtcagaggccccatggcgaggccccttggggccactgcctgaggctcacggtacagaggcctgccctgcctggccgggcaggaggttctcactgttgtgaaggttgtagacgttgtgtaatgtgtttttatctgttaaaatttttcagtgttgacacttaaaattaaacacatgcatacagaaaaaaaaaaaaaaaaaaaaaa

SEQ ID NO: 88 - protein, 742 aa, Homo sapiens [sequence omitted]

SEQ ID NO: 89 - DNA, 3149 bp, Homo sapiens
ctaaagtttttttctttgaatgacagaactacagcataatgcgtggcttcaacctgctcctcttctggggatgttgtgttatgcacagctgggaagggcacataagacccacacggaaaccaaacacaaagggtaataactgtagagacagtaccttgtgcccagcttatgccacctgcaccaatacggtggacagttactattgcacttgcaaacaaggcttcctgtccagcaatgggcaaaatcacttcaaggatccaggagtgcgatgcaaagatattgatgaatgttctcaaagcccccagccctgtggtcctaactcatcctgcaaaaacctgtcagggaggtacaagtgcagctgtttagatggtttctcttctcccactggaaatgactgggtcccaggaaagccgggcaatttctcctgtactgatatcaatgagtgcctcaccagcagggtctgccctgagcattctgactgtgtcaactccatgggaagctacagttgcagctgtcaagttggattcatctctagaaactccacctgtgaagacgtgaatgaatgtgcagatccaagagcttgcccagagcatgcaacttgtaataacactgttggaaactactcttgtttctgcaacccaggatttgaatccagcagtggccacttgagttgccagggtctcaaagcatcgtgtgaagatattgatgaatgcactgaaatgtgccccatcaattcaacatgcaccaacactcctgggagctacttttgcacctgccaccctggctttgcaccaagcagtggacagttgaatttcacagaccaaggagtggaatgtagagatattgatgagtgccgccaagatccatcaacctgtggtcctaattctatctgcaccaatgccctgggctcctacagctgtggctgcattgtaggctttcatcccaatccagaaggctcccagaaagatggcaacttcagctgccaaagggttctcttcaaatgtaaggaagatgtgatacccgataataagcagatccagcaatgccaagagggaaccgcagtgaaacctgcatatgtctccttttgtgcacaaataaataacatcttcagcgttctggacaaagtgtgtgaaaataaaacgaccgtagtttctctgaagaatacaactgagagctttgtccctgtgcttaaacaaatatccatgtggactaaattcaccaaggaagagacgtcctccctggccacagtcttcctggagagtgtggaaagcatgacactggcatctttttggaaaccctcagcaaatgtcactccggctgttcgggcggaatacttagacattgagagcaaagttatcaacaaagaatgcagtgaagagaatgtgacgttggacttggtagccaagggggataagatgaagatcgggtgttccacaattgaggaatctgaatccacagagaccactggtgtggcttttgtctcctttgtgggcatggaatcggttttaaatgagcgcttcttccaagaccaccaggctcccttgaccacctctgagatcaagctgaagatgaattctcgagtcgttgggggcataatgactggagagaagaaagacggcttctcagatccaatcatctacactctggagaacgttcagccaaagcagaagtttgagaggcccatctgtgtttcctggagcactgatgtgaagggtggaagatggacatcctttggctgtgtgatcctggaagcttctgagacatataccatctgcagctgtaatcagatggcaaatcttgccgttatcatggcgtctggggagctcacgatggacttttccttgtacatcattagccatgtaggcattatcatctccttggtgtgcctcgtcttggccatcgccacctttctgctgtgtcgctccatccgaaatcacaacacctacctccacctgcacctctgcgtgtgtctcctcttggcgaagactctcttcctcgccggtatacacaagactgacaacaagacgggctgcgccatcatcgcgggcttcctgcactaccttttccttgcctgcttcttctggatgctggtggaggctgtgatactgttcttgatggtcagaaacctgaaggtggtgaattacttcagctctcgcaacatcaagatgctgcacatctgtgcctttggttatgggctgccgatgctggtggtggtgatctctgccagtgtgcagccacagggctatggaatgcataatcgctgctggctgaatacagagacagggttcatctggagtttcttggggccagtttgcacagttatagtgatcaactcccttctcctgacctggaccttgtggatcctgaggcagaggctttccagtgttaatgccgaagtctcaacgctaaaagacaccaggttactgaccttcaaggcctttgcccagctcttcatcctgggctgctcctgggtgctgggcatttttcagattggacctgtggcaggtgtcatggcttacctgttcaccatcatcaacagcctgcagggggccttcatcttcctcatccactgtctgctcaacggccaggtacgagaagaatacaagaggtggatcactgggaagacgaagcccagctcccagtcccagacctcaaggatcttgctgtcctccatgccatccgcttccaagacgggttaaagcctttcttgctttcaaatatgctatggagccacagttgaggacagtagtttcctgcaggagcctaccctgaaatctcttctcagcttaacatggaaatgaggatcccaccagccccagaaccctctggggaagaatgttgggggccgtcttcctgtggttgtatgcactgatgagaaatcagacgtttctgctccaaacgaccattttatcttcgtgctctgcaacttcttcaattccagagtttctgagaacagacccaaattcaatggcatgaccaagaacacctggctaccattttgttttctcctgcccttgttggtgcatggttctaagcgtgcccctccagcgcctatcatacgcctgacacagagaacctctcaataaatgatttgtcgcctgtctgactgatttaccctaaaaaaaaaaaaaaaaaaaaaaaaaaaaaaa

SEQ ID NO: 90 - protein, 886 aa, Homo sapiens
MRGFNLLLFWGCCVMHSWEGHIRPTRKPNTKGNNCRDSTLCPAYATCTNTVDSYYCTCKQGFLSSNGQNHFKDPGVRCKDIDECSQSPQPCGPNSSCKNLSGRYKCSCLDGFSSPTGNDWVPGKPGNFSCTDINECLTSRVCPEHSDCVNSMGSYSCSCQVGFISRNSTCEDVNECADPRACPEHATCNNTVGNYSCFCNPGFESSSGHLSCQGLKASCEDIDECTEMCPINSTCTNTPGSYFCTCHPGFAPSSGQLNFTDQGVECRDIDECRQDPSTCGPNSICTNALGSYSCGCIVGFHPNPEGSQKDGNFSCQRVLFKCKEDVIPDNKQIQQCQEGTAVKPAYVSFCAQINNIFSVLDKVCENKTTVVSLKNTTESFVPVLKQISMWTKFTKEETSSLATVFLESVESMTLASFWKPSANVTPAVRAEYLDIESKVINKECSEENVTLDLVAKGDKMKIGCSTIEESESTETTGVAFVSFVGMESVLNERFFQDHQAPLTTSEIKLKMNSRVVGGIMTGEKKDGFSDPIIYTLENVQPKQKFERPICVSWSTDVKGGRWTSFGCVILEASETYTICSCNQMANLAVIMASGELTMDFSLYIISHVGIIISLVCLVLAIATFLLCRSIRNHNTYLHLHLCVCLLLAKTLFLAGIHKTDNKTGCAIIAGFLHYLFLACFFWMLVEAVILFLMVRNLKVVNYFSSRNIKMLHICAFGYGLPMLVVVISASVQPQGYGMHNRCWLNTETGFIWSFLGPVCTVIVINSLLLTWTLWILRQRLSSVNAEVSTLKDTRLLTFKAFAQLFILGCSWVLGIFQIGPVAGVMAYLFTIINSLQGAFIFLIHCLLNGQVREEYKRWITGKTKPSSQSQTSRILLSSMPSASKTG

SEQ ID NO: 91 - DNA, 2776 bp, Homo sapiens
ggaaaacgacacctagaagtaggagtgagattcgctgaagttcccttctgaggaagacccacccctccgcctggagagccggggctggcggtgcctgaggaccccttcggcctggacagcccacgcgggcttggggggcctcgctctgccctcatggggcggccatcggttcccgaagcggcgagtgaaaattcaaatggccagtagggggcgcactcggaagtggccgccccgcatgaggcagttcagcggccccgagagtccggggagggaggtttattctccgcctgcacgagactgtgaaatccgcaaccatgagcaggagaggcggccctggtggggaagaggccaccaacatctggacggcaggtacccagagagtgagcagctccacgcgggactgtgcacggtggccgacacccgcagggacgcccgccggacgagcacgcggagggccctcgcctccacggatgcaccatgccggtgtgaggagcatctgttcttcccactctctgcagttaacaaacccaacccaaaccaccacaggtgctcctcctggggagtttcctgtctgacaaatgccaggctcacttcaaggagaatcacgcttctttctaaagatggattcaccatttaaaacagagctctgggagcctttcggcaaatcttgaaagctgcacggcgcagagacatggatgtgacttcccaagcccggggcgtgggcctggagatgtacccaggcaccgcgcagcctgcggcccccaacaccacctcccccgagctcaacctgtcccacccgctcctgggcaccgccctggccaatgggacaggtgagctctcggagcaccagcagtacgtgatcggcctgttcctctcgtgcctctacaccatcttcctcttccccatcggctttgtgggcaacatcctgatcctggtggtgaacatcagcttccgcgagaagatgaccatccccgacctgtacttcatcaacctggcggtggcggacctcatcctggtggccgactccctcattgaggtgttcaacctgcacgagcggtactacgacatcgccgtcctgtgcaccttcatgtcgctcttcctgcaggtcaacatgtacagcagcgtcttcttcctcacctggatgagcttcgaccgctacatcgccctggccagggccatgcgctgcagcctgttccgcaccaagcaccacgcccggctgagctgtggcctcatctggatggcatccgtgtcagccacgctggtgcccttcaccgccgtgcacctgcagcacaccgacgaggcctgcttctgtttcgcggatgtccgggaggtgcagtggctcgaggtcacgctgggcttcatcgtgcccttcgccatcatcggcctgtgctactccctcattgtccgggtgctggtcagggcgcaccggcaccgtgggctgcggccccggcggcagaaggcgctccgcatgatcctcgcggtggtgctggtcttcttcgtctgctggctgccggagaacgtcttcatcagcgtgcacctcctgcagcggacgcagcctggggccgctccctgcaagcagtctttccgccatgcccaccccctcacgggccacattgtcaacctcgccgccttctccaacagctgcctaaaccccctcatctacagctttctcggggagaccttcagggacaagctgaggctgtacattgagcagaaaacaaatttgccggccctgaaccgcttctgtcacgctgccctgaaggccgtcattccagacagcaccgagcagtcggatgtgaggttcagcagtgccgtgtagacagccttggccgcataggcccagccagggtgtgactcgggagctgcacacacctgggtggacacaaggcacggccacgtcatgtctctaaactgcggtcagatgtggcttctggctcctcggggcctcgcgagggtcacgcttgcctggtcaccctggggctgcttaggaaacctcacgactggtcaccttgcactcttcacacagaattgctacaatcccaaagcgctcgccccgcagggtccaaaggccagcggtgaccagcctgtcacccagctcctccccgccaaccctgcctgccgctgcacctgcctgccgctgcaggaaacatttgacaccgtcgaccaggaaagccacacggagaggccactgtgggtgaagcgcctcagttacacaggaaccctaaagcaaatctgccaccgtgggggaactgacgctggagatgcaaggtgctggtgggtctgagctggacgtcgcggtgtgtcctctgtgcccacggtctgagctagctagcgcaccgccgagttaaagaggagaaggaaaacatgctgctctggtgcacgcctgagcgtcctccatcttccaggatggcagcaatggcgctgtgcggcctcaccaggcccacgaggagcagcagcgctcggcccggagcagcaggaaggcccctctgtggagcgcccgccgtctgctccggggtggttcagtcactgcttgttgacatcaacatggcaattgcactcatgtggactgggaccgtgcgagctgccgtgtgggttagtcgggtgccaggacaatgaaatactccagcacgtgtggctgacgaatttgtttctacagaaataacagctggggacaactgcggtgatgatgtaaaaaccttcccataaaatgtaagaaaagctgatgaggctggtgacgttcagcctttgtcaataaacctgtcatgtgcggatcctt

SEQ ID NO: 92 - protein, 375 aa, Homo sapiens
MDVTSQARGVGLEMYPGTAQPAAPNTTSPELNLSHPLLGTALANGTGELSEHQQYVIGLFLSCLYTIFLFPIGFVGNILILVVNISFREKMTIPDLYFINLAVADLILVADSLIEVFNLHERYYDIAVLCTFMSLFLQVNMYSSVFFLTWMSFDRYIALARAMRCSLFRTKHHARLSCGLIWMASVSATLVPFTAVHLQHTDEACFCFADVREVQWLEVTLGFIVPFAIIGLCYSLIVRVLVRAHRHRGLRPRRQKALRMILAVVLVFFVCWLPENVFISVHLLQRTQPGAAPCKQSFRHAHPLTGHIVNLAAFSNSCLNPLIYSFLGETFRDKLRLYIEQKTNLPALNRFCHAALKAVIPDSTEQSDVRFSSAV

SEQ ID NO: 93 - DNA, 1686 bp, Homo sapiens
ggaatggctgaaaaagcccacacctggaaatcactccctccctgctcctccacggcaggttgcatctgcgagacgcttcggtcattagaggaatgagccgggagtgagcaattcaccagctctccagcacttggtggaaagcagcaggcaaggatggatgtggttgacagccttcttgtgaatggaagcaacatcactcctccctgtgaactcgggctcgaaaatgagacgcttttctgcttggatcagccccgtccttccaaagagtggcagccagcggtgcagattctcttgtactccttgatattcctgctcagcgtgctgggaaacacgctggtcatcaccgtgctgattcggaacaagcggatgcggacggtcaccaacatcttcctcctctccctggctgtcagcgacctcatgctctgtctcttctgcatgccgttcaacctcatccccaatctgctcaaggatttcatcttcgggagcgccgtttgcaagaccaccacctacttcatgggcacctctgtgagtgtatctacctttaatctggtagccatatctctagagagatatggtgcgatttgcaaacccttacagtcccgggtctggcagacaaaatcccatgctttgaaggtgattgctgctacctggtgcctttcctttaccatcatgactccgtaccccatttatagcaacttggtgccttttaccaaaaataacaaccagaccgcgaatatgtgccgctttctactgccaaatgatgttatgcagcagtcctggcacacattcctgttactcatcctctttcttattcctggaattgtgatgatggtggcatatggattaatctctttggaactctaccagggaataaaatttgaggctagccagaagaagtctgctaaagaaaggaaacctagcaccaccagcagcggcaaatatgaggacagcgatgggtgttacctgcaaaagaccaggcccccgaggaagctggagctccggcagctgtccaccggcagcagcagcagggccaaccgcatccggagtaacagctccgcagccaacctgatggccaagaaaagggtgatccgcatgctcatcgtcatcgtggtcctcttcttcctgtgctggatgcccatcttcagcgccaacgcctggcgggcctacgacaccgcctccgcagagcgccgcctctcaggaacccccatttccttcatcctcctcctgtcctacacctcctcctgcgtcaaccccatcatctactgcttcatgaacaaacgcttccgcctcggcttcatggccaccttcccctgctgccccaatcctggtcccccaggggcgaggggagaggtgggggaggaggaggaaggcgggaccacaggagcctctctgtccaggttctcgtacagccatatgagtgcctcggtgccaccccagtgagatgtcccctgaccctccaccgcagaaggaaggcagggaggaggcagagaagaaagaacggaagaagagatcaggaagagaaggagcagagcagagctgatggagaaggaaggctccatctccagtgggaactcttcaaggtctcttttcatccttcatctgattccagagcactgctccagtggggccatgattggtttctaggcagttcaaagcaggatatgttaagtaacactcaaccatcag

SEQ ID NO: 94 - protein, 428 aa, Homo sapiens
MDVVDSLLVNGSNITPPCELGLENETLFCLDQPRPSKEWQPAVQILLYSLIFLLSVLGNTLVITVLIRNKRMRTVTNIFLLSLAVSDLMLCLFCMPFNLIPNLLKDFIFGSAVCKTTTYFMGTSVSVSTFNLVAISLERYGAICKPLQSRVWQTKSHALKVIAATWCLSFTIMTPYPIYSNLVPFTKNNNQTANMCRFLLPNDVMQQSWHTFLLLILFLIPGIVMMVAYGLISLELYQGIKFEASQKKSAKERKPSTTSSGKYEDSDGCYLQKTRPPRKLELRQLSTGSSSRANRIRSNSSAANLMAKKRVIRMLIVIVVLFFLCWMPIFSANAWRAYDTASAERRLSGTPISFILLLSYTSSCVNPIIYCFMNKRFRLGFMATFPCCPNPGPPGARGEVGEEEEGGTTGASLSRFSYSHMSASVPPQ

SEQ ID NO: 95 - DNA, 2110 bp, Homo sapiens
atggacgcggcactgctccacagcctgctggaggccaactgcagcctggcgctggctgaagagctgctcttggacggctgggggccacccctggaccccgagggtccctactcctactgcaacacgaccttggaccagatcggaacgtgctggccccgcagcgctgccggagccctcgtggagaggccgtgccccgagtacttcaacggcgtcaagtacaacacgacccggaatgcctatcgagaatgcttggagaatgggacgtgggcctcaaagatcaactactcacagtgtgagcccattttggatgacaagcagaggaagtatgacctgcactaccgcatcgcccttgtcgtcaactacctgggccactgcgtatctgtggcagccctggtggccgccttcctgcttttcctggccctgcggagcattcgctgtctgcggaatgtgattcactggaacctcatcaccacctttatcctgcgaaatgtcatgtggttcctgctgcagctcgttgaccatgaagtgcacgagagcaatgaggtctggtgccactgcatcaccaccatcttcaactacttcgtggtgaccaacttcttctggatgtttgtggaaggctgctacctgcacacggccattgtcatgacctactccactgagcgcctgcgcaagtgcctcttcctcttcatcggatggtgcatccccttccccatcatcgtcgcctgggccatcggcaagctctactatgagaatgaacagtgctggtttggcaaggagcctggcgacctggtggactacatctaccaaggccccatcattctcgtgctcctgatcaatttcgtatttctgttcaacatcgtcaggatcctaatgacaaagttacgcgcgtccaccacatccgagacaatccagtacaggaaggcagtgaaggccaccctggtgctcctgcccctcctgggcatcacctacatgctcttcttcgtcaatcccggggaggacgacctgtcacagatcatgttcatctatttcaactccttcctgcagtcgttccagggtttcttcgtgtctgtcttctactgcttcttcaatggagaggtgcgctcagccgtgaggaagaggtggcaccgctggcaggaccatcactcccttcgagtccccatggcccgggccatgtccatccctacatcacccacacggatcagcttccacagcatcaagcagacggccgctgtgtgacccctcggtcgcccacctgcacagctcccctgtcctcctccaccttcttcctctgggttctctgtgctgggcaggctctcgtggggcaggagatgggaggggagagaccagctctccagcctggcaggaaagagggggtgcggcagccaagggggactgcaagggacagggatgagtgggggccaccaggctcagcgcaagaggaagcagagggaattcacaggaccccctgagaagagccagtcagatgtctgcaggcatttgcccatcccagcctctctggccagggccttactgggcccagagcagagaaggacctgtccaacacacacagctatttatagtagcagacacagggctcccctgccctactcatggagccagcagccaggcaatggtgtggccctgcactggcccttggactccacactcagtggtgccctgcagttgggtgggttaacgccaagcaaaggatcagtttggctgccttatcccagggctgtcacctagagaggctcacttgtaccccaccctgttcctgtgtcccctccccagccatcctccccgccttgggggctccatgaaggatgcaggcttccaggcctggcttcctctcttgggagaccccttctctgcctagtccacagattaggcaatcaaggaagacgccatcagggaagccacatccttagtcaaccagttgcatcgtgcggggcaaaatgaggagcagaggcatggaggagggaggcgtgggatgggaatagcagaaccaccatgtcttcagtgattgaaactcataccccattgccctttgccctccagtctccccttcagaaacatctctgctctctgtgaaataaaccatgcctcttgg

SEQ ID NO: 96 - protein, 411 aa, Homo sapiens
MDAALLHSLLEANCSLALAEELLLDGWGPPLDPEGPYSYCNTTLDQIGTCWPRSAAGALVERPCPEYFNGVKYNTTRNAYRECLENGTWASKINYSQCEPILDDKQRKYDLHYRIALVVNYLGHCVSVAALVAAFLLFLALRSIRCLRNVIHWNLITTFILRNVMWFLLQLVDHEVHESNEVWCHCITTIFNYFVVTNFFWMFVEGCYLHTAIVMTYSTERLRKCLFLFIGWCIPFPIIVAWAIGKLYYENEQCWFGKEPGDLVDYIYQGPIILVLLINFVFLFNIVRILMTKLRASTTSETIQYRKAVKATLVLLPLLGITYMLFFVNPGEDDLSQIMFIYFNSFLQSFQGFFVSVFYCFFNGEVRSAVRKRWHRWQDHHSLRVPMARAMSIPTSPTRISFHSIKQTAAV

SEQ ID NO: 97 - DNA, 2776 bp, Homo sapiens
ggctcgctgcctcgcattgccacaggctcctgagaggtcgcgggcagtgcctgcggggaggcgcggggccctgctctgtagggctgaaggccgcccgaggttcgccaaggctctgggctctcgaaaggaagccaagaaaagaagctgcccaggtgaccagtcctgggagtgctctctcccaaggaagctccgagcgcccaggagcccttagccggggtctagtgccctttgaacaatctccagctcttcaaggaagtgggctgccgccgcctctcttgggacctggcctgggatcctttccccaaacgcaccccggcgatttttgcgcaccgggagccgaacccctgctgcgcgcagctggctgggctcaggcgcgcttcctcaacgtttcggagccgctgcccccagcgaagtccacattccaagctccaggggctttgagagagacgaccccaaggcaaggcgtttggagagctgctgaggagccaggggcttggaggagcgagaagacatgtattttcagctgagtctcagaaggggagaatctcctgtcaccaccagaaaagcaacagccccgaaatgtgattgcaactgactagcagagcagaggcccaggagtcactggattgatgatttagaatatgctaaaaagccagtgctttatttggggaattcaggggctttctggtgcccaagacagtgacctgcagatgaggactctgaacacctctgccatggacgggactgggctggtggtggagagggacttctctgttcgtatcctcactgcctgtttcctatcgctgctcatcctgtccacgctcctggggaacacgctggtctgtgctgccgttatcaggttccgacacctgcggtccaaggtgaccaacttctttgtcatctccttggctgtgtcagatctcttggtggcagtcctggtcatgccctggaaggcagtggctgagattgctggcttctggccctttgggtccttctgtaacatctgggtggcctttgacatcatgtgctccactgcatccatcctcaacctctgtgtgatcagcgtggacaggtattgggctatctccagccctttccggtatgagagaaagatgacccccaaggcagccttcatcctgatcagtgtggcatggaccttgtctgtactcatctccttcatcccagtgcagctcagctggcacaaggcaaaacccacaagcccctctgatggaaatgccacttccctggctgagaccatagacaactgtgactccagcctcagcaggacatatgccatctcatcctctgtaataagcttttacatccctgtggccatcatgattgtcacctacaccaggatctacaggattgctcagaaacaaatacggcgcattgcggccttggagagggcagcagtccacgccaagaattgccagaccaccacaggtaatggaaagcctgtcgaatgttctcaaccggaaagttcttttaagatgtccttcaaaagagaaactaaagtcctgaagactctgtcggtgatcatgggtgtgtttgtgtgctgttggctacctttcttcatcttgaactgcattttgcccttctgtgggtctggggagacgcagcccttctgcattgattccaacacctttgacgtgtttgtgtggtttgggtgggctaattcatccttgaaccccatcatttatgcctttaatgctgattttcggaaggcattttcaaccctcttaggatgctacagactttgccctgcgacgaataatgccatagagacggtgagtatcaataacaatggggccgcgatgttttccagccatcatgagccacgaggctccatctccaaggagtgcaatctggtttacctgatcccacatgctgtgggctcctctgaggacctgaaaaaggaggaggcagctggcatcgccagacccttggagaagctgtccccagccctatcggtcatattggactatgacactgacgtctctctggagaagatccaacccatcacacaaaacggtcagcacccaacctgaactcgcagatgaatcctgccacacatgctcatcccaaaagctagaggagattgctctggggtttgctattaagaaactaaggtacggtgagactctgaggtgtcaggagagccctctgctgctttccaacacacaattaactccgtttccaaatacattccagtgtattttctgtgttgttcatagtcaatcaaacagggacactacaaacatggggagccataagggacatgtctttggcttcagaattgtttttagaaatttattcttatcttaggatttaccaaatagggcaaagaatcaacagtgaacagcttcacttaaaatcaaatttttctgggaagaaaatgagatgggttgagtttgctgtatacaaacaggtgctaacactgttcccagcaaagttttcagattgtaaaggtaggtgcatgccttcataaattatttctaaaacattaattgaggcttacagtaggagtgagaaatttttttccagaattgagagatgttttgttgatattggttctatttatttattgtatatatggatatttttaatttatgatataataaatatatatttatcatatttaataggataaattaatgagttttatccaagaccttacaaccacatttctggccatttaactagcactttataagccaatgaagcaaacacacagactctgtgagattctaaatgttcatgtgtaacttctaga

SEQ ID NO: 98 - protein, 446 aa, Homo sapiens
MRTLNTSAMDGTGLVVERDFSVRILTACFLSLLILSTLLGNTLVCAAVIRFRHLRSKVTNFFVISLAVSDLLVAVLVMPWKAVAEIAGFWPFGSFCNIWVAFDIMCSTASILNLCVISVDRYWAISSPFRYERKMTPKAAFILISVAWTLSVLISFIPVQLSWHKAKPTSPSDGNATSLAETIDNCDSSLSRTYAISSSVISFYIPVAIMIVTYTRIYRIAQKQIRRIAALERAAVHAKNCQTTTGNGKPVECSQPESSFKMSFKRETKVLKTLSVIMGVFVCCWLPFFILNCILPFCGSGETQPFCIDSNTFDVFVWFGWANSSLNPIIYAFNADFRKAFSTLLGCYRLCPATNNAIETVSINNNGAAMFSSHHEPRGSISKECNLVYLIPHAVGSSEDLKKEEAAGIARPLEKLSPALSVILDYDTDVSLEKIQPITQNGQHPT

SEQ ID NO: 99 - DNA, 2062 bp, Homo sapiens
ggcacgaggcagggctgaagttgggaccgcgcacagaccgcccctgcagtccagcccgaaatgctgccgccaggcagcaacggcaccgcgtacccggggcagttcgctctataccagcagctggcgcaggggaacgccgtggggggctcggcgggggcaccgccactggggccctcacaggtggtcaccgcctgcctgctgaccctactcatcatctggaccctgctgggcaacgtgctggtgtgcgcagccatcgtgcggagccgccacctgcgcgccaacatgaccaacgtcttcatcgtgtctctggccgtgtcagaccttttcgtggcgctgctggtcatgccctggaaggcagtcgccgaggtggccggttactggccctttggagcgttctgcgacgtctgggtggccttcgacatcatgtgctccactgcctccatcctgaacctgtgcgtcatcagcgtggaccgctactgggccatctccaggcccttccgctacaagcgcaagatgactcagcgcatggccttggtcatggtcggcctggcatggaccttgtccatcctcatctccttcattccggtccagctcaactggcacagggaccaggcggcctcttggggcgggctggacctgccaaacaacctggccaactggacgccctgggaggaggacttttgggagcccgacgtgaatgcagagaactgtgactccagcctgaatcgaacctacgccatctcttcctcgctcatcagcttctacatccccgttgccatcatgatcgtgacctacacgcgcatctaccgcatcgcccaggtgcagatccgcaggatttcctccctggagagggccgcagagcacgcgcagagctgccggagcagcgcagcctgcgcgcccgacaccagcctgcgcgcttccatcaagaaggagaccaaggttctcaagaccctgtcggtgatcatgggggtcttcgtgtgttgctggctgcccttcttcatccttaactgcatggtccctttctgcagtggacaccctgaaggccctccggccggcttcccctgcgtcagtgagaccaccttcgacgtcttcgtctggttcggctgggctaactcctcactcaaccccgtcatctatgccttcaacgccgactttcagaaggtgtttgcccagctgctggggtgcagccacttctgctcccgcacgccggtggagacggtgaacatcagcaatgagctcatctcctacaaccaagacatcgtcttccacaaggaaatcgcagctgcctacatccacatgatgcccaacgccgttacccccggcaaccgggaggtggacaacgacgaggaggagggtcctttcgatcgcatgttccagatctatcagacgtccccagatggtgaccctgttgctgagtctgtctgggagctggactgcgagggggagatttctttagacaaaataacacctttcaccccgaatggattccattaaactgcattaagaaaccccctcatggatctgcataaccgcacagacactgacaagcacgcacacacacgcaaatacatgcctttccagtgctgctccctttatcatgtgtttctgtgtagtagctcgtgtgcttagaaacctcaccccattgattggtagttcgaagaattggcagaatcagttgcaataaactcagtcaaatgtacccagcctaccagagatggaccaacgatcctatgagagaagagagtatggtgctgggtccttaaaaaaaaaaatgatacttggtccttaaaaaatatgctctcccctccctttttaaacaaatggcttgttcagtcacttgtttgtgtttgaattgatttttaaacagcaggttgtgtgtgtgtgcagtgatgtggtgggagcacagctttcctgggtctggattcccgtggctttgtgcttatgtcatttcttctctctgtgctggtgggggcctctttaccatagcttaagaagtatccctgatttattctggtgtctaataaacacagattatttgtaaaaaaaaaaaaaaaaaaaaaaa

SEQ ID NO: 100 - protein, 477 aa, Homo sapiens
MLPPGSNGTAYPGQFALYQQLAQGNAVGGSAGAPPLGPSQVVTACLLTLLIIWTLLGNVLVCAAIVRSRHLRANMTNVFIVSLAVSDLFVALLVMPWKAVAEVAGYWPFGAFCDVWVAFDIMCSTASILNLCVISVDRYWAISRPFRYKRKMTQRMALVMVGLAWTLSILISFIPVQLNWHRDQAASWGGLDLPNNLANWTPWEEDFWEPDVNAENCDSSLNRTYAISSSLISFYIPVAIMIVTYTRIYRIAQVQIRRISSLERAAEHAQSCRSSAACAPDTSLRASIKKETKVLKTLSVIMGVFVCCWLPFFILNCMVPFCSGHPEGPPAGFPCVSETTFDVFVWFGWANSSLNPVIYAFNADFQKVFAQLLGCSHFCSRTPVETVNISNELISYNQDIVFHKEIAAAYIHMMPNAVTPGNREVDNDEEEGPFDRMFQIYQTSPDGDPVAESVWELDCEGEISLDKITPFTPNGFH

SEQ ID NO: 101 - DNA, 2482 bp, Homo sapiens
agagcctggccacccagtggctccaccgccctgatggatccactgaatctgtcctggtatgatgatgatctggagaggcagaactggagccggcccttcaacgggtcagacgggaaggcggacagaccccactacaactactatgccacactgctcaccctgctcatcgctgtcatcgtcttcggcaacgtgctggtgtgcatggctgtgtcccgcgagaaggcgctgcagaccaccaccaactacctgatcgtcagcctcgcagtggccgacctcctcgtcgccacactggtcatgccctgggttgtctacctggaggtggtaggtgagtggaaattcagcaggattcactgtgacatcttcgtcactctggacgtcatgatgtgcacggcgagcatcctgaacttgtgtgccatcagcatcgacaggtacacagctgtggccatgcccatgctgtacaatacgcgctacagctccaagcgccgggtcaccgtcatgatctccatcgtctgggtcctgtccttcaccatctcctgcccactcctcttcggactcaataacgcagaccagaacgagtgcatcattgccaacccggccttcgtggtctactcctccatcgtctccttctacgtgcccttcattgtcaccctgctggtctacatcaagatctacattgtcctccgcagacgccgcaagcgagtcaacaccaaacgcagcagccgagctttcagggcccacctgagggctccactaaagggcaactgtactcaccccgaggacatgaaactctgcaccgttatcatgaagtctaatgggagtttcccagtgaacaggcggagagtggaggctgcccggcgagcccaggagctggagatggagatgctctccagcaccagcccacccgagaggacccggtacagccccatcccacccagccaccaccagctgactctccccgacccgtcccaccatggtctccacagcactcccgacagccccgccaaaccagagaagaatgggcatgccaaagaccaccccaagattgccaagatctttgagatccagaccatgcccaatggcaaaacccggacctccctcaagaccatgagccgtaggaagctctcccagcagaaggagaagaaagccactcagatgctcgccattgttctcggcgtgttcatcatctgctggctgcccttcttcatcacacacatcctgaacatacactgtgactgcaacatcccgcctgtcctgtacagcgccttcacgtggctgggctatgtcaacagcgccgtgaaccccatcatctacaccaccttcaacattgagttccgcaaggccttcctgaagatcctccactgctgactctgctgcctgcccgcacagcagcctgcttcccacctccctgcccaggccggccagcctcacccttgcgaaccgtgagcaggaaggcctgggtggatcggcctcctcttcttagccccggcaggccctgcagtgttcgcttggctccatgctcctcactgcccgcacaccctcactctgccagggcagtgctagtgagctgggcatggtaccagccctggggctggccccagctcaggggcagctcatagagtcccccctcccacctccagtccccctatccttggcaccaaagatgcagccgccttccttgaccttcctctggggctctagggttgctggagcctgagtcagggcccagaggctgagttttctctttgtggggcttggcgtggagcaggcggtggggagagatggacagttcacaccctgcaaggcccacaggaggcaagcaagctctcttgccgaggagccaggcaacttcagtcctgggagacccatgtaaataccagactgcaggttggacccgagagattcccaagccaaaaaccttagctccctcccgcaccccgatgtggacctctactttccaggctagtccggacccacctcaccccgttacagctccccaagtggtttccacatgctctgagaagaggagccctcatcttgaagggcccaggagggtctatggggagaggaactccttggcctagcccaccctgctgccttctgacggccctgcaatgtatcccttctcacagcacatgctggccagcctggggcctggcagggaggtcaggccctggaactctatctgggcctgggctagggacatcagaggttctttgagggactgcctctgccacactctgacgcaaaaccactttccttttctattccttctggcctttcctctctcctgtttcccttcccttccactgcctctgccttagaggagcccacggctaagaggctgctgaaaaccatctggcctggcctggccctgccctgaggaaggaggggaagctgcagcttgggagagcccctggggcctagactctgtaacatcactatccgatgcaccaaactaataaaactttgacgagtcaccttc

SEQ ID NO: 102 - protein, 443 aa, Homo sapiens
MDPLNLSWYDDDLERQNWSRPFNGSDGKADRPHYNYYATLLTLLIAVIVFGNVLVCMAVSREKALQTTTNYLIVSLAVADLLVATLVMPWVVYLEVVGEWKFSRIHCDIFVTLDVMMCTASILNLCAISIDRYTAVAMPMLYNTRYSSKRRVTVMISIVWVLSFTISCPLLFGLNNADQNECIIANPAFVVYSSIVSFYVPFIVTLLVYIKIYIVLRRRRKRVNTKRSSRAFRAHLRAPLKGNCTHPEDMKLCTVIMKSNGSFPVNRRRVEAARRAQELEMEMLSSTSPPERTRYSPIPPSHHQLTLPDPSHHGLHSTPDSPAKPEKNGHAKDHPKIAKIFEIQTMPNGKTRTSLKTMSRRKLSQQKEKKATQMLAIVLGVFIICWLPFFITHILNIHCDCNIPPVLYSAFTWLGYVNSAVNPIIYTTFNIEFRKAFLKILHC

SEQ ID NO: 103 - DNA, 1496 bp, Homo sapiens
taaagaaaacggatacattcgaaagcagctatgaaacatgcactaaggtctaatagggaagctggaaaagcagcactcaagtaatttcaccttagaggcaaaaatgggtgatttctttctgttcatttcatagtttctgagtcctgagaaaggcaaagtttgctttgcttgggtatgtctgctgtcagtaaatggctgcaggagccgaagtggtaaactcctcggtctccagaaatcagaagaaaattttaggaagccccttggcatcacgcacctccctctgggctatggcatctctgagtcagctgagtagccacctgaactacacctgtggggcagagaactccacaggtgccagccaggcccgcccacatgcctactatgccctctcctactgcgcgctcatcctggccatcgtcttcggcaatggcctggtgtgcatggctgtgctgaaggagcgggccctgcagactaccaccaactacttagtagtgagcctggctgtggcagacttgctggtggccaccttggtgatgccctgggtggtatacctggaggtgacaggtggagtctggaatttcagccgcatttgctgtgatgtttttgtcaccctggatgtcatgatgtgtacagccagcatccttaatctctgtgccatcagcatagacaggtacactgcagtggtcatgcccgttcactaccagcatggcacgggacagagctcctgtcggcgcgtggccctcatgatcacggccgtctgggtactggcctttgctgtgtcctgccctcttctgtttggctttaataccacaggggaccccactgtctgctccatctccaaccctgattttgtcatctactcttcagtggtgtccttctacctgccctttggagtgactgtccttgtctatgccagaatctatgtggtgctgaaacaaaggagacggaaaaggatcctcactcgacagaacagtcagtgcaacagtgtcaggcctggcttcccccaacaaaccctctctcctgacccggcacatctggagctgaagcgttactacagcatctgccaggacactgccttgggtggaccaggcttccaagaaagaggaggagagttgaaaagagaggagaagactcggaattccctgagtcccaccatagcgcccaagctcagcttagaagttcgaaaactcagcaatggcagattatcgacatctttgaagctggggcccctgcaacctcggggagtgccacttcgggagaagaaggcaacccaaatggtggccattgtgcttggggccttcattgtctgctggctgcccttcttcttgacccatgttctcaatacccactgccagacatgccacgtgtccccagagctttacagtgccacgacatggctgggctacgtgaatagcgccctcaaccctgtgatctataccaccttcaatatcgagttccggaaagccttcctcaagatcctgtcttgctgagggagc

SEQ ID NO: 104 - protein, 400 aa, Homo sapiens
MASLSQLSSHLNYTCGAENSTGASQARPHAYYALSYCALILAIVFGNGLVCMAVLKERALQTTTNYLVVSLAVADLLVATLVMPWVVYLEVTGGVWNFSRICCDVFVTLDVMMCTASILNLCAISIDRYTAVVMPVHYQHGTGQSSCRRVALMITAVWVLAFAVSCPLLFGFNTTGDPTVCSISNPDFVIYSSVVSFYLPFGVTVLVYARIYVVLKQRRRKRILTRQNSQCNSVRPGFPQQTLSPDPAHLELKRYYSICQDTALGGPGFQERGGELKREEKTRNSLSPTIAPKLSLEVRKLSNGRLSTSLKLGPLQPRGVPLREKKATQMVAIVLGAFIVCWLPFFLTHVLNTHCQTCHVSPELYSATTWLGYVNSALNPVIYTTFNIEFRKAFLKILSC

SEQ ID NO: 105 - DNA, 1504 bp, Homo sapiens
atggggaaccgcagcaccgcggacgcggacgggctgctggctgggcgcgggccggccgcgggggcatctgcgggggcatctgcggggctggctgggcagggcgcggcggcgctggtggggggcgtgctgctcatcggcgcggtgctcgcggggaactcgctcgtgtgcgtgagcgtggccaccgagcgcgccctgcagacgcccaccaactccttcatcgtgagcctggcggccgccgacctcctcctcgctctcctggtgctgccgctcttcgtctactccgaggtccagggtggcgcgtggctgctgagcccccgcctgtgcgacgccctcatggccatggacgtcatgctgtgcaccgcctccatcttcaacctgtgcgccatcagcgtggacaggttcgtggccgtggccgtgccgctgcgctacaaccggcagggtgggagccgccggcagctgctgctcatcggcgccacgtggctgctgtccgcggcggtggcggcgcccgtactgtgcggcctcaacgacgtgcgcggccgcgaccccgccgtgtgccgcctggaggaccgcgactacgtggtctactcgtccgtgtgctccttcttcctaccctgcccgctcatgctgctgctctactgggccacgttccgcggcctgcagcgctgggaggtggcacgtcgcgccaagctgcacggccgcgcgccccgccgacccagcggccctggcccgccttcccccacgccacccgcgccccgcctcccccaggacccctgcggccccgactgtgcgccccccgcgcccggccttccccggggtccctgcggccccgactgtgcgcccgccgcgcccggcctccccccggacccctgcggccccgactgtgcgccccccgcgcccggcctcccccaggacccctgcggccccgactgtgcgccccccgcgcccggccttccccggggtccctgcggccccgactgtgcgccccccgcgcccggcctcccccaggacccctgcggccccgactgtgcgccccccgcgcccggcctccccccggacccctgcggctccaactgtgctccccccgacgccgtcagagccgccgcgctcccaccccagactccaccgcagacccgcaggaggcggcgtgccaagatcaccggccgggagcgcaaggccatgagggtcctgccggtggtggtcggggccttcctgctgtgctggacgcccttcttcgtggtgcacatcacgcaggcgctgtgtcctgcctgctccgtgcccccgcggctggtcagcgccgtcacctggctgggctacgtcaacagcgccctcaaccccgtcatctacactgtcttcaacgccgagttccgcaacgtcttccgcaaggccctgcgtgcctgctgctgagccgggcacccccggacgccccccggcctgatggccaggcctcagggaccaaggagatggggagggcgcttttgtacgttaattaaacaaattccttccc

SEQ ID NO: 106 - protein, 467 aa, Homo sapiens
MGNRSTADADGLLAGRGPAAGASAGASAGLAGQGAAALVGGVLLIGAVLAGNSLVCVSVATERALQTPTNSFIVSLAAADLLLALLVLPLFVYSEVQGGAWLLSPRLCDALMAMDVMLCTASIFNLCAISVDRFVAVAVPLRYNRQGGSRRQLLLIGATWLLSAAVAAPVLCGLNDVRGRDPAVCRLEDRDYVVYSSVCSFFLPCPLMLLLYWATFRGLQRWEVARRAKLHGRAPRRPSGPGPPSPTPPAPRLPQDPCGPDCAPPAPGLPRGPCGPDCAPAAPGLPPDPCGPDCAPPAPGLPQDPCGPDCAPPAPGLPRGPCGPDCAPPAPGLPQDPCGPDCAPPAPGLPPDPCGSNCAPPDAVRAAALPPQTPPQTRRRRRAKITGRERKAMRVLPVVVGAFLLCWTPFFVVHITQALCPACSVPPRLVSAVTWLGYVNSALNPVIYTVFNAEFRNVFRKALRACC

SEQ ID NO: 107 - DNA, 1773 bp, Homo sapiens
ccgaggagcctgcgctgctcctggctcacagcgctccgggcgaggagagcgggcggaccggggggctgggccggtgcgggcggcgaggcaggcggacgaggcgcagagacagcggggcggccggggcgcggcacgcggcgggtcggggccggcctctgccttgccgctcccctcgcgtcggatccccgcgcccaggcagccggtggagagggacgcggcggacgccggcagccatggaaccggccccctccgccggcgccgagctgcagcccccgctcttcgccaacgcctcggacgcctaccctagcgccttccccagcgctggcgccaatgcgtcggggccgccaggaccggggagcgcctcgtccctcgccctggcaatcgccatcaccgcgctctactcggccgtgtgcgccgtggggctgctgggcaacgtgcttgtcatgttcggcatcgtccggtacactaagatgaagacggccaccaacatctacatcttcaacctggccttagccgatgcgctggccaccagcacgctgcctttccagagtgccaagtacctgatggagacgtggcccttcggcgagctgctctgcaaggctgtgctctccatcgactactacaatatgttcaccagcatcttcacgctcaccatgatgagtgttgaccgctacatcgctgtctgccaccctgtcaaggccctggacttccgcacgcctgccaaggccaagctgatcaacatctgtatctgggtcctggcctcaggcgttggcgtgcccatcatggtcatggctgtgacccgtccccgggacggtgcagtggtgtgcatgctccagttccccagccccagctggtactgggacacggtgaccaagatctgcgtgttcctcttcgccttcgtggtgcccatcctcatcatcaccgtgtgctatggcctcatgctgctgcgcctgcgcagtgtgcgcctgctgtcgggctccaaggagaaggaccgcagcctgcggcgcatcacgcgcatggtgctggtggttgtgggcgccttcgtggtgtgttgggcgcccatccacatcttcgtcatcgtctggacgctggtggacatcgaccggcgcgacccgctggtggtggctgcgctgcacctgtgcatcgcgctgggctacgccaatagcagcctcaaccccgtgctctacgctttcctcgacgagaacttcaagcgctgcttccgccagctctgccgcaagccctgcggccgcccagaccccagcagcttcagccggccccgcgaagccacggcccgcgagcgtgtcaccgcctgcaccccgtccgatggtcccggcggtggccgtgccgcctgaccaggccatccggcccccagacgcccctccctagttgtacccggaggccacatgagtcccagtgggaggcgcgagccatgatgtggagtggggccagtagataggtcggagggctttgggaccgccagatggggcctctgtttcggagacgggaccgggccgctagatgggcatggggtgggcctctggtttggggcgaggcagaggacagatcaatggcgcagtgcctctggtctgggtgcccccgtccacggctctaggtggggcgggaaagccagtgactccaggagaggagcgggacctgtggctctacaactgagtccttaaacagggcatctccaggaaggcggggcttcaaccttgagacagcttcggtttctaacttggagccggactttcggagttggggggtccggggccc

SEQ ID NO: 108 - protein, 372 aa, Homo sapiens
MEPAPSAGAELQPPLFANASDAYPSAFPSAGANASGPPGPGSASSLALAIAITALYSAVCAVGLLGNVLVMFGIVRYTKMKTATNIYIFNLALADALATSTLPFQSAKYLMETWPFGELLCKAVLSIDYYNMFTSIFTLTMMSVDRYIAVCHPVKALDFRTPAKAKLINICIWVLASGVGVPIMVMAVTRPRDGAVVCMLQFPSPSWYWDTVTKICVFLFAFVVPILIITVCYGLMLLRLRSVRLLSGSKEKDRSLRRITRMVLVVVGAFVVCWAPIHIFVIVWTLVDIDRRDPLVVAALHLCIALGYANSSLNPVLYAFLDENFKRCFRQLCRKPCGRPDPSSFSRPREATARERVTACTPSDGPGGGRAA

SEQ ID NO: 109 - DNA, 1559 bp, Homo sapiens
gggcctgaaccaaacggtgccatggggaactgtctgcacagggtgagtatggggccaggccccagagtcccttatccctatgcccctcatttcccctgctgtttgcccctcagtctttatatctcttccttttcctcctcatcttttctcccttcccgcttttttcctcttccttcaaagtctttttccttctctccttcctatgctagcctcctagctccctcttgtgtccctccctttgcctttgagtcagttccatcctggtctcttggtgcctttccttctgaccttgcactgctcctccagccccagctgccctggcttccccaggactgttcctgctccggctcttcaggctccctgctttgtccttttccactgtccgcactgcatctgactcctgcagagaccttgttctcccacccgaccttcctctctgtcctcccctcccacctgcccctcaattcccaggagactcttccggtgtaactctgatggcctcctctgggtatgtcctccaggcggagctctccccctcaactgagaactcaagtcagctggacttcgaagatgtatggaattcttcctatggtgtgaatgattccttcccagatggagactatgatgccaacctggaagcagctgccccctgccactcctgtaacctgctggatgactctgcactgcccttcttcatcctcaccagtgtcctgggtatcctagctagcagcactgtcctcttcatgcttttcagacctctcttccgctggcagctctgccctggctggcctgtcctggcacagctggctgtgggcagtgccctcttcagcattgtggtgcccgtcttggccccagggctaggtagcactcgcagctctgccctgtgtagcctgggctactgtgtctggtatggctcagcctttgcccaggctttgctgctagggtgccatgcctccctgggccacagactgggtgcaggccaggtcccaggcctcaccctggggctcactgtgggaatttggggagtggctgccctactgacactgcctgtcaccctggccagtggtgcttctggtggactctgcaccctgatatacagcacggagctgaaggctttgcaggccacacacactgtagcctgtcttgccatctttgtcttgttgccattgggtttgtttggagccaaggggctgaagaaggcattgggtatggggccaggcccctggatgaatatcctgtgggcctggtttattttctggtggcctcatggggtggttctaggactggatttcctggtgaggtccaagctgttgctgttgtcaacatgtctggcccagcaggctctggacctgctgctgaacctggcagaagccctggcaattttgcactgtgtggctacgcccctgctcctcgccctattctgccaccaggccacccgcaccctcttgccctctctgcccctccctgaaggatggtcttctcatctggacacccttggaagcaaatcctagttctcttcccacctgtcaacctgaattaaagtctacactgcctttgtg

SEQ ID NO: 110 - protein, 338 aa, Homo sapiens
MASSGYVLQAELSPSTENSSQLDFEDVWNSSYGVNDSFPDGDYDANLEAAAPCHSCNLLDDSALPFFILTSVLGILASSTVLFMLFRPLFRWQLCPGWPVLAQLAVGSALFSIVVPVLAPGLGSTRSSALCSLGYCVWYGSAFAQALLLGCHASLGHRLGAGQVPGLTLGLTVGIWGVAALLTLPVTLASGASGGLCTLIYSTELKALQATHTVACLAIFVLLPLGLFGAKGLKKALGMGPGPWMNILWAWFIFWWPHGVVLGLDFLVRSKLLLLSTCLAQQALDLLLNLAEALAILHCVATPLLLALFCHQATRTLLPSLPLPEGWSSHLDTLGSKS

SEQ ID NO: 111 - DNA, 1638 bp, Homo sapiens
ggaattccctgatatacacctggaccaccaccaatggatatacaaatggcaaacaattttactccgccctctgcaactcctcagggaaatgactgtgacctctatgcacatcacagcacggccaggatagtaatgcctctgcattacagcctcgtcttcatcattgggctcgtgggaaacttactagccttggtcgtcattgttcaaaacaggaaaaaaatcaactctaccaccctctattcaacaaatttggtgatttctgatatactttttaccaccgctttgcctacacgaatagcctactatgcaatgggctttgactggagaatcggagatgccttgtgtaggataactgcgctagtgttttacatcaacacatatgcaggtgtgaactttatgacctgcctgagtattgaccgcttcattgctgtggtgcaccctctacgctacaacaagataaaaaggattgaacatgcaaaaggcgtgtgcatatttgtctggattctagtatttgctcagacactcccactcctcatcaaccctatgtcaaagcaggaggctgaaaggattacatgcatggagtatccaaactttgaagaaactaaatctcttccctggattctgcttggggcatgtttcataggatatgtacttccacttataatcattctcatctgctattctcagatctgctgcaaactcttcagaactgccaaacaaaacccactcactgagaaatctggtgtaaacaaaaaggctctcaacacaattattcttattattgttgtgtttgttctctgtttcacaccttaccatgttgcaattattcaacatatgattaagaagcttcgtttctctaatttcctggaatgtagccaaagacattcgttccagatttctctgcactttacagtatgcctgatgaacttcaattgctgcatggacccttttatctacttctttgcatgtaaagggtataagagaaaggttatgaggatgctgaaacggcaagtcagtgtatcgatttctagtgctgtgaagtcagcccctgaagaaaattcacgtgaaatgacagaaacgcagatgatgatacattccaagtcttcaaatggaaagtgaaatggattgtattttggtttatagtgacgtaaactgtatgacaaactttgcaggacttcccttataaagcaaaataattgttcagcttccaattagtattcttttatatttctttcattgggcactttcccatctccaactcggaagtaagcccaagagaacaacataaagcaaacaacataaagcacaataaaaatgcaaataaatattttcatttttatttgtaaacgaatacaccaaaaggaggcgctcttaataactcccaatgtaaaaagttttgttttaataaaaaatttaattattatttcttgccaacaaatggctagaaaggactgaatagattatatattgccagatgttaatactgtaacatactttttaaataacatatttcttaaatccaaatttctctcaatgttagatttaattccctcaataacaccaatgttttgttttgtttcgttctgggtcataaaactttgttaaggaactcttttggaataaagagcaggatgctgc

SEQ ID NO: 112 - protein, 361 aa, Homo sapiens [sequence omitted]

SEQ ID NO: 113 - DNA, 4286 bp, Homo sapiens
gagacattccggtgggggactctggccagcccgagcaacgtggatcctgagagcactcccaggtaggcatttgccccggtgggacgccttgccagagcagtgtgtggcaggcccccgtggaggatcaacacagtggctgaacactgggaaggaactggtacttggagtctggacatctgaaacttggctctgaaactgcgcagcggccaccggacgccttctggagcaggtagcagcatgcagccgcctccaagtctgtgcggacgcgccctggttgcgctggttcttgcctgcggcctgtcgcggatctggggagaggagagaggcttcccgcctgacagggccactccgcttttgcaaaccgcagagataatgacgccacccactaagaccttatggcccaagggttccaacgccagtctggcgcggtcgttggcacctgcggaggtgcctaaaggagacaggacggcaggatctccgccacgcaccatctcccctcccccgtgccaaggacccatcgagatcaaggagactttcaaatacatcaacacggttgtgtcctgccttgtgttcgtgctggggatcatcgggaactccacacttctgagaattatctacaagaacaagtgcatgcgaaacggtcccaatatcttgatcgccagcttggctctgggagacctgctgcacatcgtcattgacatccctatcaatgtctacaagctgctggcagaggactggccatttggagctgagatgtgtaagctggtgcctttcatacagaaagcctccgtgggaatcactgtgctgagtctatgtgctctgagtattgacagatatcgagctgttgcttcttggagtagaattaaaggaattggggttccaaaatggacagcagtagaaattgttttgatttgggtggtctctgtggttctggctgtccctgaagccataggttttgatataattacgatggactacaaaggaagttatctgcgaatctgcttgcttcatcccgttcagaagacagctttcatgcagttttacaagacagcaaaagattggtggctgttcagtttctatttctgcttgccattggccatcactgcatttttttatacactaatgacctgtgaaatgttgagaaagaaaagtggcatgcagattgctttaaatgatcacctaaagcagagacgggaagtggccaaaaccgtcttttgcctggtccttgtctttgccctctgctggcttccccttcacctcagcaggattctgaagctcactctttataatcagaatgatcccaatagatgtgaacttttgagctttctgttggtattggactatattggtatcaacatggcttcactgaattcctgcattaacccaattgctctgtatttggtgagcaaaagattcaaaaactgctttaagtcatgcttatgctgctggtgccagtcatttgaagaaaaacagtccttggaggaaaagcagtcgtgcttaaagttcaaagctaatgatcacggatatgacaacttccgttccagtaataaatacagctcatcttgaaagaagaactattcactgtatttcattttctttatattggaccgaagtcattaaaacaaaatgaaacatttgccaaaacaaaacaaaaaactatgtatttgcacagcacactattaaaatattaagtgtaattattttaacactcacagctacatatgacattttatgagctgtttacggcatggaaagaaaatcagtgggaattaagaaagcctcgtcgtgaaagcacttaattttttacagttagcacttcaacatagctcttaacaacttccaggatattcacacaacacttaggcttaaaaatgagctcactcagaatttctattctttctaaaaagagatttatttttaaatcaatgggactctgatataaaggaagaataagtcactgtaaaacagaacttttaaatgaagcttaaattactcaatttaaaattttaaaatcctttaaaacaacttttcaattaatattatcacactattatcagattgtaattagatgcaaatgagagagcagtttagttgttgcatttttcggacactggaaacatttaaatgatcaggagggagtaacagaaagagcaaggctgtttttgaaaatcattacactttcactagaagcccaaacctcagcattctgcaatatgtaaccaacatgtcacaaacaagcagcatgtaacagactggcacatgtgccagctgaatttaaaatataatacttttaaaaagaaaattattacatcctttacattcagttaagatcaaacctcacaaagagaaatagaatgtttgaaaggctatcccaaaagacttttttgaatctgtcattcacataccctgtgaagacaatactatctacaattttttcaggattattaaaatcttcttttttcactatcgtagcttaaactctgtttggttttgtcatctgtaaatacttacctacatacactgcatgtagatgattaaatgagggcaggccctgtgctcatagctttacgatggagagatgccagtgacctcataataaagactgtgaactgcctggtgcagtgtccacatgacaaaggggcaggtagcaccctctctcacccatgctgtggttaaaatggtttctagcatatgtataatgctatagttaaaatactatttttcaaaatcatacagattagtacatttaacagctacctgtaaagcttattactaatttttgtattatttttgtaaatagccaatagaaaagtttgcttgacatggtgcttttctttcatctagaggcaaaactgctttttgagaccgtaagaacctcttagctttgtgcgttcctgcctaatttttatatcttctaagcaaagtgccttaggatagcttgggatgagatgtgtgtgaaagtatgtacaagagaaaacggaagagagaggaaatgaggtggggttggaggaaacccatggggacagattcccattcttagcctaacgttcgtcattgcctcgtcacatcaatgcaaaaggtcctgattttgttccagcaaaacacagtgcaatgttctcagagtgactttcgaaataaattgggcccaagagctttaactcggtcttaaaatatgcccaaatttttactttgtttttcttttaataggctgggccacatgttggaaataagctagtaatgttgttttctgtcaatattgaatgtgatggtacagtaaaccaaaacccaacaatgtggccagaaagaaagagcaataataattaattcacacaccatatggattctatttataaatcacccacaaacttgttctttaatttcatcccaatcactttttcagaggcctgttatcatagaagtcattttagactctcaattttaaattaattttgaatcactaatattttcacagtttattaatatatttaatttctatttaaattttagattatttttattaccatgtactgaatttttacatcctgataccctttccttctccatgtcagtatcatgttctctaattatcttgccaaattttgaaactacacacaaaaagcatacttgcattatttataataaaattgcattcagtggctttttaaaaaaaatgtttgattcaaaactttaacatactgataagtaagaaacaattataatttctttacatactcaaaaccaagatagaaaaaggtgctatcgttcaacttcaaaacatgtttcctagtattaaggactttaatatagcaacagacaaaattattgttaacatggatgttacagctcaaaagatttataaaagattttaacctattttctcccttattatccactgctaatgtggatgtatgttcaaacaccttttagtattgatagcttacatatggccaaaggaatacagtttatagcaaaacatgggtatgctgtagctaactttataaaagtgtaatataacaatgtaaaaaattatatatctgggaggattttttggttgcctaaagtggctatagttactgattttttattatgtaagcaaaaccaataaaaatttaagtttttttaacaactaccttatttttcactgtacagacactaattcattaaatactaattgattgtttaaaagaaatataaatgtgacaagtggacattatttatgttaaatatacaattatcaagcaagtatgaagttattcaattaaaatgccacatttctggtctctggg

SEQ ID NO: 114 - protein, 442 aa, Homo sapiens
MQPPPSLCGRALVALVLACGLSRIWGEERGFPPDRATPLLQTAEIMTPPTKTLWPKGSNASLARSLAPAEVPKGDRTAGSPPRTISPPPCQGPIEIKETFKYINTVVSCLVFVLGIIGNSTLLRIIYKNKCMRNGPNILIASLALGDLLHIVIDIPINVYKLLAEDWPFGAEMCKLVPFIQKASVGITVLSLCALSIDRYRAVASWSRIKGIGVPKWTAVEIVLIWVVSVVLAVPEAIGFDIITMDYKGSYLRICLLHPVQKTAFMQFYKTAKDWWLFSFYFCLPLAITAFFYTLMTCEMLRKKSGMQIALNDHLKQRREVAKTVFCLVLVFALCWLPLHLSRILKLTLYNQNDPNRCELLSFLLVLDYIGINMASLNSCINPIALYLVSKRFKNCFKSCLCCWCQSFEEKQSLEEKQSCLKFKANDHGYDNFRSSNKYSSS

SEQ ID NO: 115 - DNA, 4105 bp, Homo sapiens
gaattcgcggccgcctcttgcggtcccagagtggagtggaaggtctggagctttgggaggagacggggaggacagactggaggcgtgttcctccggagttttctttttcgtgcgagccctcgcgcgcgcgtacagtcatcccgctggtctgacgattgtggagaggcggtggagaggcttcatccatcccacccggtcgtcgccggggattggggtcccagcgacacctccccgggagaagcagtgcccaggaagttttctgaagccggggaagctgtgcagccgaagccgccgccgcgccggagcccgggacaccggccaccctccgcgccacccaccctcgctttctccggcttcctctggcccaggcgccgcgcggacccggcagctgtctgcgcacgccgagctccacggtgaaaaaaaaagtgaaggtgtaaaagcagcacaagtgcaataagagatatttcctcaaatttgcctcaagatggaaaccctttgcctcagggcatccttttggctggcactggttggatgtgtaatcagtgataatcctgagagatacagcacaaatctaagcaatcatgtggatgatttcaccacttttcgtggcacagagctcagcttcctggttaccactcatcaacccactaatttggtcctacccagcaatggctcaatgcacaactattgcccacagcagactaaaattacttcagctttcaaatacattaacactgtgatatcttgtactattttcatcgtgggaatggtggggaatgcaactctgctcaggatcatttaccagaacaaatgtatgaggaatggccccaacgcgctgatagccagtcttgcccttggagaccttatctatgtggtcattgatctccctatcaatgtatttaagctgctggctgggcgctggccttttgatcacaatgactttggcgtatttctttgcaagctgttcccctttttgcagaagtcctcggtggggatcaccgtcctcaacctctgcgctcttagtgttgacaggtacagagcagttgcctcctggagtcgtgttcagggaattgggattcctttggtaactgccattgaaattgtctccatctggatcctgtcctttatcctggccattcctgaagcgattggcttcgtcatggtaccctttgaatataggggtgaacagcataaaacctgtatgctcaatgccacatcaaaattcatggagttctaccaagatgtaaaggactggtggctcttcgggttctatttctgtatgcccttggtgtgcactgcgatcttctacaccctcatgacttgtgagatgttgaacagaaggaatggcagcttgagaattgccctcagtgaacatcttaagcagcgtcgagaagtggcaaaaacagttttctgcttggttgtaatttttgctctttgctggttccctcttcacttaagccgtatattgaagaaaactgtgtataacgaaatggacaagaaccgatgtgaattacttagtttcttactgctcatggattacatcggtattaacttggcaaccatgaattcatgtataaaccccatagctctgtattttgtgagcaagaaatttaaaaattgtttccagtcatgcctctgctgctgctgttaccagtccaaaagtctgatgacctcggtccccatgaacggaacaagcatccagtggaagaaccacgatcaaaacaaccacaacacagaccggagcagccataaggacagcatgaactgaccacccttagaagcactcctcggtactcccataatcctctcggagaaaaaaatcacaaggcaactgtgactccgggaatctcttctctgatccttcttccttaattcactcccacacccaagaagaaatgctttccaaaaccgcaaggtagactggtttatccacccacaacatctacgaatcgtacttctttaattgatctaatttacatattctgcgtgttgtattcagcactaaaaaatggtgggagctgggggagaatgaagactgttaaatgaaaccagaaggatatttactacttttgcatgaaaatagagctttcaagtacatggctagcttttatggcagttctggtgaatgttcaatgggaactggtcaccatgaaactttagagattaacgacaagattttctactttttttaagtgattttttgtccttcagccaaacacaatatgggctcaggtcacttttatttgaaatgtcatttggtgccagtattttttaactgcataatagcctaacatgattatttgaacttatttacacatagtttgaaaaaaaaaagacaaaaatagtattcaggtgagcaattagattagtattttccacgtcactatttatttttttaaaacacaaattctaaagctacaacaaatactacaggcccttaaagcacagtctgatgacacatttggcagtttaatagatgttactcaaagaattttttaagaactgtattttattttttaaatggtgttttattacaagggaccttgaacatgttttgtatgttaaattcaaaagtaatgcttcaatcagatagttctttttcacaagttcaatactgtttttcatgtaaattttgtatgaaaaatcaatgtcaagtaccaaaatgttaatgtatgtgtcatttaactctgcctgagactttcagtgcactgtatatagaagtctaaaacacacctaagagaaaaagatcgaatttttcagatgattcggaaattttcattcaggtatttgtaatagtgacatatatatgtatatacatatcacctcctattctcttaatttttgttaaaatgttaactggcagtaagtcttttttgatcattcccttttccatataggaaacataattttgaagtggccagatgagtttatcatgtcagtgaaaaataattacccacaaatgccaccagtaacttaacgattcttcacttcttggggttttcagtatgaacctaactccccaccccaacatctccctcccacattgtcaccatttcaaagggcccacagtgacttttgctgggcattttcccagatgtttacagactgtgagtacagcagaaaatcttttactagtgtgtgtgtgtatatatataaacaattgtaaatttcttttagcccatttttctagactgtctctgtggaatatatttgtgtgtgtgatatatgcatgtgtgtgatggtatgtatggatttaatctaatctaataattgtgccccgcagttgtgccaaagtgcatagtctgagctaaaatctaggtgattgttcatcatgacaacctgcctcagtccattttaacctgtagcaaccttctgcattcataaatcttgtaatcatgttaccattacaaatgggatataagaggcagcgtgaaagcagatgagctgtggactagcaatatagggttttgtttggttggttggtttgataaagcagtatttggggtcatattgtttcctgtgctggagcaaaagtcattacactttgaagtattatattgttcttatcctcaattcaatgtggtgatgaaattgccaggttgtctgatatttctttcagacttcgccagacagattgctgataataaattaggtaagataatttgttgggccatattttaggacaggtaaaataacatcaggttccagttgcttgaattgcaaggctaagaagtactgcccttttgtgtgttagcagtcaaatctattattccactggcgcatcatatgcagtgatatatgcctataatataagccataggttcacaccattttgtttagacaattgtctttttttcaagatgctttgtttctttcatatgaaaaaaatgcattttataaattcagaaagtcatagatttctgaaggcgtcaacgtgcattttatttatggactggtaagtaactgtggtttactagcaggaatatttccaatttctacctttactacatcttttcaacaagtaactttgtagaaatgagccagaagccaaggccctgagttggcagtggcccataagtgtaaaataaaagtttacagaaacctt

SEQ ID NO: 116 - protein, 427 aa, Homo sapiens
METLCLRASFWLALVGCVISDNPERYSTNLSNHVDDFTTFRGTELSFLVTTHQPTNLVLPSNGSMHNYCPQQTKITSAFKYINTVISCTIFIVGMVGNATLLRIIYQNKCMRNGPNALIASLALGDLIYVVIDLPINVFKLLAGRWPFDHNDFGVFLCKLFPFLQKSSVGITVLNLCALSVDRYRAVASWSRVQGIGIPLVTAIEIVSIWILSFILAIPEAIGFVMVPFEYRGEQHKTCMLNATSKFMEFYQDVKDWWLFGFYFCMPLVCTAIFYTLMTCEMLNRRNGSLRIALSEHLKQRREVAKTVFCLVVIFALCWFPLHLSRILKKTVYNEMDKNRCELLSFLLLMDYIGINLATMNSCINPIALYFVSKKFKNCFQSCLCCCCYQSKSLMTSVPMNGTSIQWKNHDQNNHNTDRSSHKDSMN

SEQ ID NO: 117 - DNA, 3783 bp, Homo sapiens
caacaggcacctggctgcagccaggaaggaccgcacgccctttcgcgcaggagagtggaaggagggagctgtttgccagcaccgaggtcttgcggcacaggcaacgcttgacctgagtcttgcagaatgaaaggcatcacaggaggcctctgcatgatgtggcttccaaagactcaaggaccacccacattacaagtctggattgaggaaggcagaaatggagattcaaacaccacgtcttctattattttattaatcaatctgtagacatgtgtccccactgcagggagtgaactgctccaagggagaaacttctgggagcctccaaactcctagctgtctcatcccttgccctggagagacggcagaaccatggcattttatagctgctgctgggtcctcttggcactcacctggcacacctctgcctacgggccagaccagcgagcccaaaagaagggggacattatccttggggggctctttcctattcattttggagtagcagctaaagatcaagatctcaaatcaaggccggagtctgtggaatgtatcaggtataatttccgtgggtttcgctggttacaggctatgatatttgccatagaggagataaacagcagcccagcccttcttcccaacttgacgctgggatacaggatatttgacacttgcaacaccgtttctaaggccttggaagccaccctgagttttgttgctcaaaacaaaattgattctttgaaccttgatgagttctgcaactgctcagagcacattccctctacgattgctgtggtgggagcaactggctcaggcgtctccacggcagtggcaaatctgctggggctcttctacattccccaggtcagttatgcctcctccagcagactcctcagcaacaagaatcaattcaagtctttcctccgaaccatccccaatgatgagcaccaggccactgccatggcagacatcatcgagtatttccgctggaactgggtgggcacaattgcagctgatgacgactatgggcggccggggattgagaaattccgagaggaagctgaggaaagggatatctgcatcgacttcagtgaactcatctcccagtactctgatgaggaagagatccagcatgtggtagaggtgattcaaaattccacggccaaagtcatcgtggttttctccagtggcccagatcttgagcccctcatcaaggagattgtccggcgcaatatcacgggcaagatctggctggccagcgaggcctgggccagctcctccctgatcgccatgcctcagtacttccacgtggttggcggcaccattggattcgctctgaaggctgggcagatcccaggcttccgggaattcctgaagaaggtccatcccaggaagtctgtccacaatggttttgccaaggagttttgggaagaaacatttaactgccacctccaagaaggtgcaaaaggacctttacctgtggacacctttctgagaggtcacgaagaaagtggcgacaggtttagcaacagctcgacagccttccgacccctctgtacaggggatgagaacatcagcagtgtcgagaccccttacatagattacacgcatttacggatatcctacaatgtgtacttagcagtctactccattgcccacgccttgcaagatatatatacctgcttacctgggagagggctcttcaccaatggctcctgtgcagacatcaagaaagttgaggcgtggcaggtcctgaagcacctacggcatctaaactttacaaacaatatgggggagcaggtgacctttgatgagtgtggtgacctggtggggaactattccatcatcaactggcacctctccccagaggatggctccatcgtgtttaaggaagtcgggtattacaacgtctatgccaagaagggagaaagactcttcatcaacgaggagaaaatcctgtggagtgggttctccagggaggtgcccttctccaactgcagccgagactgcctggcagggaccaggaaagggatcattgagggggagcccacctgctgctttgagtgtgtggagtgtcctgatggggagtatagtgatgagacagatgccagtgcctgtaacaagtgcccagatgacttctggtccaatgagaaccacacctcctgcattgccaaggagatcgagtttctgtcgtggacggagccctttgggatcgcactcaccctctttgccgtgctgggcattttcctgacagcctttgtgctgggtgtgtttatcaagttccgcaacacacccattgtcaaggccaccaaccgagagctctcctacctcctcctcttctccctgctctgctgcttctccagctccctgttcttcatcggggagccccaggactggacgtgccgcctgcgccagccggcctttggcatcagcttcgtgctctgcatctcatgcatcctggtgaaaaccaaccgtgtcctcctggtgtttgaggccaagatccccaccagcttccaccgcaagtggtgggggctcaacctgcagttcctgctggttttcctctgcaccttcatgcagattgtcatctgtgtgatctggctctacaccgcgcccccctcaagctaccgcaaccaggagctggaggatgagatcatcttcatcacgtgccacgagggctccctcatggccctgggcttcctgatcggctacacctgcctgctggctgccatctgcttcttctttgccttcaagtcccggaagctgccggagaacttcaatgaagccaagttcatcaccttcagcatgctcatcttcttcatcgtctggatctccttcattccagcctatgccagcacctatggcaagtttgtctctgccgtagaggtgattgccatcctggcagccagctttggcttgctggcgtgcatcttcttcaacaagatctacatcattctcttcaagccatcccgcaacaccatcgaggaggtgcgttgcagcaccgcagctcacgctttcaaggtggctgcccgggccacgctgcgccgcagcaacgtctcccgcaagcggtccagcagccttggaggctccacgggatccaccccctcctcctccatcagcagcaagagcaacagcgaagacccattcccacagcccgagaggcagaagcagcagcagccgctggccctaacccagcaagagcagcagcagcagcccctgaccctcccacagcagcaacgatctcagcagcagcccagatgcaagcagaaggtcatctttggcagcggcacggtcaccttctcactgagctttgatgagcctcagaagaacgccatggcccacgggaattctacgcaccagaactccctggaggcccagaaaagcagcgatacgctgacccgacaccagccattactcccgctgcagtgcggggaaacggacttagatctgaccgtccaggaaacaggtctgcaaggacctgtgggtggagaccagcggccagaggtggaggaccctgaagagttgtccccagcacttgtagtgtccagttcacagagctttgtcatcagtggtggaggcagcactgttacagaaaacgtagtgaattcataaaatggaaggagaagactgggctagggagaatgcagagaggtttcttggggtcccagggatgaggaatcgccccagactcctttcctctgaggaagaagggataatagacacatcaaatgccccgaatttagtcacaccatcttaaatgacagtgaattgacccatgttcccttt

SEQ ID NO: 118 - protein, 1078 aa, Homo sapiens
MAFYSCCWVLLALTWHTSAYGPDQRAQKKGDIILGGLFPIHFGVAAKDQDLKSRPESVECIRYNFRGFRWLQAMIFAIEEINSSPALLPNLTLGYRIFDTCNTVSKALEATLSFVAQNKIDSLNLDEFCNCSEHIPSTIAVVGATGSGVSTAVANLLGLFYIPQVSYASSSRLLSNKNQFKSFLRTIPNDEHQATAMADIIEYFRWNWVGTIAADDDYGRPGIEKFREEAEERDICIDFSELISQYSDEEEIQHVVEVIQNSTAKVIVVFSSGPDLEPLIKEIVRRNITGKIWLASEAWASSSLIAMPQYFHVVGGTIGFALKAGQIPGFREFLKKVHPRKSVHNGFAKEFWEETFNCHLQEGAKGPLPVDTFLRGHEESGDRFSNSSTAFRPLCTGDENISSVETPYIDYTHLRISYNVYLAVYSIAHALQDIYTCLPGRGLFTNGSCADIKKVEAWQVLKHLRHLNFTNNMGEQVTFDECGDLVGNYSIINWHLSPEDGSIVFKEVGYYNVYAKKGERLFINEEKILWSGFSREVPFSNCSRDCLAGTRKGIIEGEPTCCFECVECPDGEYSDETDASACNKCPDDFWSNENHTSCIAKEIEFLSWTEPFGIALTLFAVLGIFLTAFVLGVFIKFRNTPIVKATNRELSYLLLFSLLCCFSSSLFFIGEPQDWTCRLRQPAFGISFVLCISCILVKTNRVLLVFEAKIPTSFHRKWWGLNLQFLLVFLCTFMQIVICVIWLYTAPPSSYRNQELEDEIIFITCHEGSLMALGFLIGYTCLLAAICFFFAFKSRKLPENFNEAKFITFSMLIFFIVWISFIPAYASTYGKFVSAVEVIAILAASFGLLACIFFNKIYIILFKPSRNTIEEVRCSTAAHAFKVAARATLRRSNVSRKRSSSLGGSTGSTPSSSISSKSNSEDPFPQPERQKQQQPLALTQQEQQQQPLTLPQQQRSQQQPRCKQKVIFGSGTVTFSLSFDEPQKNAMAHGNSTHQNSLEAQKSSDTLTRHQPLLPLQCGETDLDLTVQETGLQGPVGGDQRPEVEDPEELSPALVVSSSQSFVISGGGSTVTENVVNS

SEQ ID NO: 119 - DNA, 2631 bp, Homo sapiens
ggcacgaggaacaacctatttgcaaagttggcgcaaacattcctgcctgacaggaccatggacacaggttgtagagatagagatggctctggctgtgcattcagcagattctgtagatagaattaataggacttggatgggattgtggtgagagaaagtgaaatgaaagataagttctagtttggaagttttaacaactgaatgtttaaactcaaatagacacaaaatattggaagagtggcaggtttgggaggatgagacaatcaactgtttggttgagccacgttaggtttgaaatgtctacgggatcccgtggggagaggttatatcagactggagcaccagagagaggccaaggctgatagtttagatgaaaagagagcatgatattttaagccctgagactggataatatcacctatagaaagactatatagagataagagaggtggggaacaagtaaaagctgcgggacactcctaaatttagagtcaaatttagagcagaaaatactagcaaaggggactgaaaagcggtggccaattgagcttcaaatgcaagtgaaagtgtgttgtgtgtacatttatcatctcatggcacaggaaaaacgtgatttaaggagaaggaagcgatccaatgggaagaagagatccaatggatcctctatcacgaagatattgagataagaaccaatatggatttgcacccactgcatttgcagccttgaggtcataagcatcctcaggaaaatgcaccaggtgctgctggcaagatggaaaccaacttctccactcctctgaatgaatatgaagaagtgtcctatgagtctgctggctacactgttctgcggatcctcccattggtggtgcttggggtcacctttgtcctcggggtcctgggcaatgggcttgtgatctgggtggctggattccggatgacacgcacagtcaccaccatctgttacctgaacctggccctggctgacttttctttcacggccacattaccattcctcattgtctccatggccatgggagaaaaatggccttttggctggttcctgtgtaagttaattcacatcgtggtggacatcaacctctttggaagtgtcttcttgattggtttcattgcactggaccgctgcatttgtgtcctgcatccagtctgggcccagaaccaccgcactgtgagtctggccatgaaggtgatcgtcggaccttggattcttgctctagtccttaccttgccagttttcctctttttgactacagtaactattccaaatggggacacatactgtactttcaactttgcatcctggggtggcacccctgaggagaggctgaaggtggccattaccatgctgacagccagagggattatccggtttgtcattggctttagcttgccgatgtccattgttgccatctgctatgggctcattgcagccaagatccacaaaaagggcatgattaaatccagccgtcccttacgggtcctcactgctgtggtggcttctttcttcatctgttggtttccctttcaactggttgcccttctgggcaccgtctggctcaaagagatgttgttctatggcaagtacaaaatcattgacatcctggttaacccaacgagctccctggccttcttcaacagctgcctcaaccccatgctttacgtctttgtgggccaagacttccgagagagactgatccactccctgcccaccagtctggagagggccctgtctgaggactcagccccaactaatgacacggctgccaattctgcttcacctcctgcagagactgagttacaggcaatgtgaggatggggtcagggatattttgagttctgttcatcctaccctaatgccagttccagcttcatctacccttgagtcatattgaggcattcaaggatgcacagctcaagtatttattcaggaaaaatgcttttgtgtccctgatttggggctaagaaatagacagtcaggctactaaaatattagtgttattttttgttttttgacttctgcctataccctggggtaagtggagttgggaaatacaagaagagaaagaccagtggggatttgtaagacttagatgagatagcgcataataaggggaagactttaaagtataaagtaaaatgtttgctgtaggttttttatagctattaaaaaaaatcagattatggaagttttcttctatttttagtttgctaagagttttctgtttctttttcttacatcatgagtggactttgcattttatcaaatgcattttctacatgtattaagatggtcatattattcttcttcttttatgtaaatcattataaataatgttcattaagttctgaatgttaaactactcttgaattcctggaataaaccacacttagtcctgatgtactttaaatatttatatctcacaggagttggttagaatttctgtgtttatgtttatatactgttatttcactttttctactatccttgctaagttttcatagaaaataaggaacaaagagaaacttgtaatggtctctgaaaaggaattgagaagtaattcctctgattctgttttctggtgttatatctttattaaatattcagaaaaattc

SEQ ID NO: 120 - protein, 351 aa, Homo sapiens
METNFSTPLNEYEEVSYESAGYTVLRILPLVVLGVTFVLGVLGNGLVIWVAGFRMTRTVTTICYLNLALADFSFTATLPFLIVSMAMGEKWPFGWFLCKLIHIVVDINLFGSVFLIGFIALDRCICVLHPVWAQNHRTVSLAMKVIVGPWILALVLTLPVFLFLTTVTIPNGDTYCTFNFASWGGTPEERLKVAITMLTARGIIRFVIGFSLPMSIVAICYGLIAAKIHKKGMIKSSRPLRVLTAVVASFFICWFPFQLVALLGTVWLKEMLFYGKYKIIDILVNPTSSLAFFNSCLNPMLYVFVGQDFRERLIHSLPTSLERALSEDSAPTNDTAANSASPPAETELQAM

SEQ ID NO: 121 - DNA, 2393 bp, Homo sapiens
cgctgagatctgtggaggtttttctctgcaaatgcagaaagaaatcaggtggatggatgcataattatggccctgctcctggtctctttgctggcattcctgagcttgggctcaggatgtcatcatcggatctgtcactgctctaacagggtttttctctgccaagagagcaaggtgacagagattccttctgacctcccgaggaatgccattgaactgaggtttgtcctcaccaagcttcgagtcatccaaaaaggtgcattttcaggatttggggacctggagaaaatagagatctctcagaatgatgtcttggaggtgatagaggcagatgtgttctccaaccttcccaaattacatgaaattagaattgaaaaggccaacaacctgctctacatcacccctgaggccttccagaaccttcccaaccttcaatatctgttaatatccaacacaggtattaagcaccttccagatgttcacaagattcattctctccaaaaggttttacttgacattcaagataacataaacatccacacaattgaaagaaattctttcgtggggctgagctttgaaagtgtgattctatggctgaataagaatgggattcaagaaatacacaactgtgcattcaatggaacccaactagatgcagtgaatctaagcgataataataatttagaagaattgcctaatgatgttttccacggagcctctggaccagtcattctagatatttcaagaacaaggatccattccctgcctagctatggcttagaaaatcttaagaagctgagggccaggtcgacttacaacttaaaaaagctgcctactctggaaaagcttgtcgccctcatggaagccagcctcacctatcccagccattgctgtgcctttgcaaactggagacggcaaatctctgagcttcatccaatttgcaacaaatctattttaaggcaagaagttgattatatgactcaggctaggggtcagagatcctctctggcagaagacaatgagtccagctacagcagaggatttgacatgacgtacactgagtttgactatgacttatgcaatgaagtggttgacgtgacctgctcccctaagccagatgcattcaacccatgtgaagatatcatggggtacaacatcctcagagtcctgatatggtttatcagcatcctggccatcactgggaacatcatagtgctagtgatcctaactaccagccaatataaactcacagtccccaggttccttatgtgcaacctggcctttgctgatctctgcattggaatctacctgctgctcattgcatcagttgatatccataccaagagccaatatcacaactatgccattgactggcaaactggggcaggctgtgatgctgctggctttttcactgtctttgccagtgagctgtcagtctacactctgacagctatcaccttggaaagatggcataccatcacgcatgccatgcagctggactgcaaggtgcagctccgccatgctgccagtgtcatggtgatgggctggatttttgcttttgcagctgccctctttcccatctttggcatcagcagctacatgaaggtgagcatctgcctgcccatggatattgacagccctttgtcacagctgtatgtcatgtccctccttgtgctcaatgtcctggcctttgtggtcatctgtggctgctatatccacatctacctcacagtgcggaaccccaacatcgtgtcctcctctagtgacaccaggatcgccaagcgcatggccatgctcatcttcactgacttcctctgcatggcacccatttctttctttgccatttctgcctccctcaaggtgcccctcatcactgtgtccaaagcaaagattctgctggttctgtttcaccccatcaactcctgtgccaaccccttcctctatgccatctttaccaaaaactttcgcagagatttcttcattctgctgagcaagtgtggctgctatgaaatgcaagcccaaatttataggacagaaacttcatccactgtccacaacacccatccaaggaatggccactgctcttcagctcccagagtcaccagtggttccacttacatacttgtccctctaagtcatttagcccaaaactaaaacacaatgtgaaaatgtatctgagtattgaatgataattcagtccttgcctttgaagggtatgtcacaaggagctgacagtgcttctacacatttcatctaatttaatattcctggcatacctttaaggtaaattggtcaggaactattaattccatgtgatacattaggaagctgaattattagtaacaacaataataattaaagaatgcaatactgtaaaaaagcggccgcgaatt

SEQ ID NO: 122 - protein, 695 aa, Homo sapiens [sequence omitted]

SEQ ID NO: 123 - DNA, 1716 bp, Homo sapiens
gccaactccgtggtggtctgggtgaatatccaggccaagaccacaggctatgacacgcactgctacatcttgaacctggccattgccgacctgtgggttgtcctcaccatcccagtctgggtggtcagtctcgtgcagcacaaccagtggcccatgggcgagctcacgtgcaaagtcacacacctcatcttctccatcaacctcttcagcagcattttcttcctcacgtgcatgagcgtggaccgctacctctccatcacctacttcaccaacacccccagcagcaggaagaagatggtacgccgtgtcgtctgcatcctggtgtggctgctggccttctgcgtgtctctgcctgacacctactacctgaagaccgtcacgtctgcgtccaacaatgagacctactgccggtccttctaccccgagcacagcatcaaggagtggctgatcggcatggagctggtctccgttgtcttgggctttgccgttcccttctccattatcgctgtcttctacttcctgctggccagagccatctcggcgtccagtgaccaggagaagcacagcagccggaagatcatcttctcctacgtggtggtcttccttgtctgctggttgccctaccacgtggcggtgctgctggacatcttctccatcctgcactacatccctttcacctgccggctggagcacgccctcttcacggccctgcatgtcacacagtgcctgtcgctggtgcactgctgcgtcaaccctgtcctctacagcttcatcaatcgcaactacaggtacgagctgatgaaggccttcatcttcaagtactcggccaaaacagggctcaccaagctcatcgatgcctccagagtctcagagacggagtactctgccttggagcagagcaccaaatgatctgccctggagaggctctgggacgggtttacttgtttttgaacagggtgatgggccctatggttttctagagcaaagcaaagtagcttcgggtcttgatgcttgagtagagtgaagaggggagcacgtgccccctgcatccattytctctttctcttgatgacgcagctgtcatttggctgtgcgtgctgacagttttgcaacaggcagagctgtgtcgcacagcagtgctgtgcgtcagagccagctgaggacaggcttgcctggacttctgtaagataggattttctgtgtttcctgaattttttatatggtgatttgtatttaaattttaagactttattttctcactattggtgtaccttataaatgtatttgaaagttaaatatattttaaatattgtttgggaggcatagtgctgacatatattcagagtgttgtagttttaaggttagcgtgactttcagttttgactaaggatgacactaattgttagctgttttgaaattatatatatataaatatataaatatatgccagtcttggctgaaatgttttatttaccatagttttatatctgtgtggtgttttgtaccggcacgggatatggaacgaaaactgctttgtaatgcagtttgtgacattaatagtattgtaaagttacattttaaaataaacaaaaaactgttctggactgcaaatctgcacacacaacgaacagttgcatttcagagagttctctcaatttgtaagttatttttttttaataaagatttttgtttcctaaaaaaaaaaaaaaaaaaaaa

SEQ ID NO: 124 - protein, 362 aa, Homo sapiens
MDLHLFDYAEPGNFSDISWPCNSSDCIVVDTVMCPNMPNKSVLLYTLSFIYIFIFVIGMIANSVVVWVNIQAKTTGYDTHCYILNLAIADLWVVLTIPVWVVSLVQHNQWPMGELTCKVTHLIFSINLFSGIFFLTCMSVDRYLSITYFTNTPSSRKKMVRRVVCILVWLLAFCVSLPDTYYLKTVTSASNNETYCRSFYPEHSIKEWLIGMELVSVVLGFAVPFSIIAVFYFLLARAISASSDQEKHSSRKIIFSYVVVFLVCWLPYHVAVLLDIFSILHYIPFTCRLEHALFTALHVTQCLSLVHCCVNPVLYSFINRNYRYELMKAFIFKYSAKTGLTKLIDASRVSETEYSALEQNAK

SEQ ID NO: 125 - DNA, 3056 bp, Homo sapiens
atcccgctagaatccgtccagtctctgctcgcgcaccgtgacttctaaggggcgcggatttcagccgagctgttttcgcctctcagttgcagcagagaagcccctggcacccgactctatccaccaccaggaagcctcccaaaagagctctcgccctgtggacgactcggaatccctggaaaagccgggagggagtcggaggcgccagcccactggggaggtggcgctgggcgcgcgggatgcgcggggagccttctctgcaggagccgcacagtgcactgctgcgcgctgggcagtgcggggaagcgccgcgggaaggagcggctccgagcaacaggtgcagcacgcagccgctccgggagccagggaaaaccgccggcgaagatctggagcggtaaggcggagagaagggtctttccacctgcgcggctgcagccggcggatccctcttcccaggctccgtggtcgcgcagcgggcggaggcgcccgggcaggggaccccagtgctctcgagatcaccgtcccttcccgagaaggtccagctccgggctcccgaacccaccctctctcagaaggtcgcggcgcaaagacggtgccaccaggcacggccaccggatccccgctcccgctggctcgcgcctcgggggaagctcagactcctaaactcgcactctccgtgctttgcgccgggacccctggccacccccggcgcctgctatcccgccctccctccccgcgcgccccgccgctcgccgggacagccccgcgggccatggagctggcggtcgggaacctcagcgagggcaacgcgagctggccggagccccccgccccggagcccgggccgctgttcggcatcggcgtggagaacttcgtcacgctggtggtgttcggcctgatcttcgcgctgggcgtgctgggcaacagcctagtgatcaccgtgctggcgcgcagcaagccgggcaagccgcggagcaccaccaacctgttcatcctcaacctgagcatcgccgacctggcctacctgctcttctgcatccccttccaggccaccgtgtacgcgctgcccacctgggtgctgggcgccttcatctgcaagttcatccactacttcttcaccgtgtccatgctggtgagcatcttcaccctggccgcgatgtccgtggaccgctacgtggccatcgtgcactcgcggcgctcctcctccctcagggtgtcccgcaacgcgctgctgggcgtgggctgcatctgggcgctgtccattgccatggcctcgcccgtggcctaccaccagggcctcttccacccgcgcgccagcaaccagaccttctgctgggagcagtggcccgaccctcgccacaagaaggcctacgtggtgtgcaccttcgtcttcggctacctgctgccgctcctgctcatctgcttctgctatgccaaggtccttaatcacttgcataaaaagttgaagaacatgtcaaagaagtctgaagcatccaagaaaaagactgcacagacagttctggtggtggttgtggtgtttggaatctcctggctgccgcaccacatcatccatctctgggctgagtttggagttttcccgctgacgccggcttccttcctcttcagaatcaccgcccactgcctggcgtacagcaattcctccgtgaatcctatcatttatgcatttctctctgaaaatttcaggaaggcctataaacaagtgttcaagtgtcacattcgcaaagattcacacctgagtgatactaaagaaaataaaagtcgaatagacaccccaccatcaaccaattgtactcatgtgtgataaaagatagagtatccttatggttgagtttccatataagtggaccagacacagaaacaaacagaatgagctagtaagcgatgctgcaacttgttatcttaacaagaattcaagtcgttttaattaaatcccacgtgtgttaaaaagtactttgatccatttaggaaattcctaggtctagtgagaattatttttcaattttattttagttctaaattatgtttcagaaacaaaagacaatgctgtacagttttattcctcttcagacatgaaagggaacatatatattccatatatatgttcaactcttcatagattgtgaactggcccatcaatatggtcaggaatatttgcagtctacattttaaagccaatttatttagaaaaaaaatttgagctttaattctttaattttaagagaagtaatattgtgaactatgtattttaaaatatgatcatggacacacaatgatgaattttttggccatttacatagacatatctattaagtggaaagaaggctttctgaagtctgtttgcacaggtggcatttgcttccaattgtagctagcgcacagagctttggaagcctgtcattatgagatacagtcggtttacctcaggagtcaattcagtgttgtactggtgacctgggatgcagtagtaggcactgttgattcaaatttatcctgtgaaactggctttatagagttaacaaaacagagtcagagaccactgtcttaacagtggaagatgcaaataagtttttgagaataaaactggattttgaaattttacattagtacttgacaaaagttttcattttgccttgaatggaacctactaaaaagagagatgaaaaaaaatcagcgaggttgatgtagataataatttctatgggaccaaagactagacagaattcagtaagtcacatgaagtaatggtcatgcctgtacataaagcatatttcatgtttgatttagatgacattcaaaaaaaatcatgggactgaatatacctggggtatcctatcttgtacaaatgcatgctttttcattaaatttgtaatgatgtttaatgaacatttccaccaaacattatttcctctaaaaatgttaatttggggttaaaaccatcaccatttgaatttcaaatgtagttttcatgacaattttatattgatgtgtgtttacaatgagaaaatggcatgaaaatattaaattgtcttgtatcg

SEQ ID NO: 126 - protein, 349 aa, Homo sapiens
MELAVGNLSEGNASWPEPPAPEPGPLFGIGVENFVTLVVFGLIFALGVLGNSLVITVLARSKPGKPRSTTNLFILNLSIADLAYLLFCIPFQATVYALPTWVLGAFICKFIHYFFTVSMLVSIFTLAAMSVDRYVAIVHSRRSSSLRVSRNALLGVGCIWALSIAMASPVAYHQGLFHPRASNQTFCWEQWPDPRHKKAYVVCTFVFGYLLPLLLICFCYAKVLNHLHKKLKNMSKKSEASKKKTAQTVLVVVVVFGISWLPHHIIHLWAEFGVFPLTPASFLFRITAHCLAYSNSSVNPIIYAFLSENFRKAYKQVFKCHIRKDSHLSDTKENKSRIDTPPSTNCTHV

SEQ ID NO: 127 - DNA, 2025 bp, Homo sapiens
ggcagcggtggcaggggctgcaggagcaagtgaccaggagcaggactggggacaggcctgatcgcccctgcacgaaccagacccttcgccgccctcacgatgactacctctccgatcctgcagctgctgctgcggctctcactgtgcgggctgctgctccagagggcggagacaggctctaaggggcagacggcgggggagctgtaccagcgctgggaacggtaccgcagggagtgccaggagaccttggcagccgcggaaccgccttcaggcctcgcctgtaacgggtccttcgatatgtacgtctgctgggactatgctgcacccaatgccactgcccgtgcgtcctgcccctggtacctgccctggcaccaccatgtggctgcaggtttcgtcctccgccagtgtggcagtgatggccaatggggactttggagagaccatacacaatgtgagaacccagagaagaatgaggcctttctggaccaaaggctcatcttggagcggttgcaggtcatgtacactgtcggctactccctgtctctcgccacactgctgctagccctgctcatcttgagtttgttcaggcggctacattgcactagaaactatatccacatcaacctgttcacgtctttcatgctgcgagctgcggccattctcagccgagaccgtctgctacctcgacctggcccctaccttggggaccaggcccttgcgctgtggaaccaggccctcgctgcctgccgcacggcccagatcgtgacccagtactgcgtgggtgccaactacacgtggctgctggtggagggcgtctacctgcacagtctcctggtgctcgtgggaggctccgaggagggccacttccgctactacctgctcctcggctggggggcccccgcgcttttcgtcattccctgggtgatcgtcaggtacctgtacgagaacacgcagtgctgggagcgcaacgaagtcaaggccatttggtggattatacggacccccatcctcatgaccatcttgattaatttcctcatttttatccgcattcttggcattctcctgtccaagctgaggacacggcaaatgcgctgccgggattaccggctgaggctggctcgctccacgctgacgctggtgcccctgctgggtgtccacgaggtggtgtttgctcccgtgacagaggaacaggcccggggcgccctgcgcttcgccaagctcggctttgagatcttcctcagctccttccagggcttcctggtcagcgtcctctactgcttcatcaacaaggaggtgcagtcggagatccgccgtggctggcaccactgccgcctgcgccgcagcctgggcgaggagcaacgccagctcccggagcgcgccttccgggccctgccctccggctccggcccgggcgaggtccccaccagccgcggcttgtcctcggggaccctcccagggcctgggaatgaggccagccgggagttggaaagttactgctagggggcgggatccccgtgtctgttcagttagcatggatttattgagtgccaactgcgtgccaggcccagtacggaggacgctggggaaatggtgaaggaaacagaaaaaaggtccctgcccttctggagatgacaactgagtggggaaaacagaccgtgaacacaaaacatcaagttccacacacgctatggaatggttatgaagggaagcgagaagggggcctagggtggtctgggaggcgtctccaaggaggtgacacttaagccatccccgaaagaggtgaaagagatcactttggggagagctggagaacaggattctaggcggaagcgatagcataggcaaaggcccttgggcaggaaggcgctcagccttggctggagtagaattaagtcagagccaacaggttggggagagacagagaagtgggcaggggcacccaagttgggatttcatttcaggtgcattggagattcttaggagtgtctcttgggggtaatattttattttttaaaaaatgaggat

SEQ ID NO: 128 - protein, 466 aa, Homo sapiens
MTTSPILQLLLRLSLCGLLLQRAETGSKGQTAGELYQRWERYRRECQETLAAAEPPSGLACNGSFDMYVCWDYAAPNATARASCPWYLPWHHHVAAGFVLRQCGSDGQWGLWRDHTQCENPEKNEAFLDQRLILERLQVMYTVGYSLSLATLLLALLILSLFRRLHCTRNYIHINLFTSFMLRAAAILSRDRLLPRPGPYLGDQALALWNQALAACRTAQIVTQYCVGANYTWLLVEGVYLHSLLVLVGGSEEGHFRYYLLLGWGAPALFVIPWVIVRYLYENTQCWERNEVKAIWWIIRTPILMTILINFLIFIRILGILLSKLRTRQMRCRDYRLRLARSTLTLVPLLGVHEVVFAPVTEEQARGALRFAKLGFEIFLSSFQGFLVSVLYCFINKEVQSEIRRGWHHCRLRRSLGEEQRQLPERAFRALPSGSGPGEVPTSRGLSSGTLPGPGNEASRELESYC

SEQ ID NO: 129 - DNA, 1726 bp, Homo sapiens
ccagattctaaatatcaggaaagacgctgtgggaaaatagcaggccaaaagttcttagtaaactgcagccagggagactcagactagaatggaggtagaaagaactgatgcagagtgggtttaattctaagcctttttgtggctaagttttgttgttgttaacttattgaatttagagttgtattgcactggtcatgtgaaagccagagcagcaccagtgtcaaaatagtgacagagagttttgaataccatagttagtatatatgtactcagagtatttttattaaagaaggcaaagagcccggcatagatcttatcttcatcttcactcggttgcaaaatcaatagttaagaaatagcatctaagggaacttttaggtgggaaaaaaaatctagagatggctctaaatgactgtttccttctgaacttggaggtggaccatttcatgcactgcaacatctccagtcacagtgcggatctccccgtgaacgatgactggtcccacccggggatcctctatgtcatccctgcagtttatggggttatcattctgataggcctcattggcaacatcactttgatcaagatcttctgtacagtcaagtccatgcgaaacgttccaaacctgttcatttccagtctggctttgggagacctgctcctcctaataacgtgtgctccagtggatgccagcaggtacctggctgacagatggctatttggcaggattggctgcaaactgatcccctttatacagcttacctctgttggggtgtctgtcttcacactcacggcgctctcggcagacagatacaaagccattgtccggccaatggatatccaggcctcccatgccctgatgaagatctgcctcaaagccgcctttatctggatcatctccatgctgctggccattccagaggccgtgttttctgacctccatcccttccatgaggaaagcaccaaccagaccttcattagctgtgccccatacccacactctaatgagcttcaccccaaaatccattctatggcttcctttctggtcttctacgtcatcccactgtcgatcatctctgtttactactacttcattgctaaaaatctgatccagagtgcttacaatcttcccgtggaagggaatatacatgtcaagaagcagattgaatcccggaagcgacttgccaagacagtgctggtgtttgtgggcctgttcgccttctgctggctccccaatcatgtcatctacctgtaccgctcctaccactactctgaggtggacacctccatgctccactttgtcaccagcatctgtgcccgcctcctggccttcaccaactcctgcgtgaacccctttgccctctacctgctgagcaagagtttcaggaaacagttcaacactcagctgctctgttgccagcctggcctgatcatccggtctcacagcactggaaggagtacaacctgcatgacctccctcaagagtaccaacccctccgtggccacctttagcctcatcaatggaaacatctgtcacgagcggtatgtctagattgacccttgattttgccccctgagggacggttttgctttatggctagacaggaacccttgcatccattgttgtgtctgtgccctccaaagagccttcagaatgctcctgagtggtgtaggtgggggtggggaggcccaaatgatggatcaccattatattttgaaagaagc

SEQ ID NO: 130 - protein, 384 aa, Homo sapiens
MALNDCFLLNLEVDHFMHCNISSHSADLPVNDDWSHPGILYVIPAVYGVIILIGLIGNITLIKIFCTVKSMRNVPNLFISSLALGDLLLLITCAPVDASRYLADRWLFGRIGCKLIPFIQLTSVGVSVFTLTALSADRYKAIVRPMDIQASHALMKICLKAAFIWIISMLLAIPEAVFSDLHPFHEESTNQTFISCAPYPHSNELHPKIHSMASFLVFYVIPLSIISVYYYFIAKNLIQSAYNLPVEGNIHVKKQIESRKRLAKTVLVFVGLFAFCWLPNHVIYLYRSYHYSEVDTSMLHFVTSICARLLAFTNSCVNPFALYLLSKSFRKQFNTQLLCCQPGLIIRSHSTGRSTTCMTSLKSTNPSVATFSLINGNICHERYV

SEQ ID NO: 131 - DNA, 1969 bp, Homo sapiens
atggagctgctcaagctgaaccggagcgtgcagggaaccggacccgggccgggggcttccctgtgccgcccgggggcgcctctcctcaacagcagcagtgtgggcaacctcagctgcgagccccctcgcattcgcggagccgggacacgagaattggagctggccattagaatcactctttacgcagtgatcttcctgatgagcgttggaggaaatatgctcatcatcgtggtcctgggactgagccgccgcctgaggactgtcaccaatgccttcctcctctcactggcagtcagcgacctcctgctggctgtggcttgcatgcccttcaccctcctgcccaatctcatgggcacattcatctttggcaccgtcatctgcaaggcggtttcctacctcatgggggtgtctgtgagtgtgtccacgctaagcctcgtggccatcgcactggagcggtacagcgccatctgccgaccactgcaggcacgagtgtggcagacgcgctcccacgcggctcgcgtgattgtagccacgtggctgctgtccggactactcatggtgccctaccccgtgtacactgtcgtgcaaccagtggggcctcgtgtgctgcagtgcgtgcatcgctggcccagtgcgcgggtccgccagacctggtccgtactgctgcttctgctcttgttcttcatcccgggtgtggttatggccgtggcctacgggcttatctctcgcgagctctacttagggcttcgctttgacggcgacagtgacagcgacagccaaagcagggtccgaaaccaaggcgggctgccaggggctgttcaccagaacgggcgttgccggcctgagactggcgcggttggcgaagacagcgatggctgctacgtgcaacttccacgttcccggcctgccctggagctgacggcgctgacggctccagggccgggatccggctcccggcccacccaggccaagctgctggctaagaagcgcgtggtgcgaatgttgctggtgatcgttgtgcttttttttctgtgttggttgccagtttatagtgccaacacgtggcgcgcctttgatggcccgggtgcacaccgagcactctcgggtgctcctatctccttcattcacttgctgagctacgcctcggcctgtgtcaaccccctggtctactgcttcatgcaccgtcgctttcgccaggcctgcctggaaacttgcgctcgctgctgcccccggcctccacgagctcgccccagggctcttcccgatgaggaccctcccactccctccattgcttcgctgtccaggcttagctacaccaccatcagcacactgggccctggctgaggagtagaggggccgtgggggttgaggcagggcaaatgacatgcactgacccttccagacatagaaaacacaaaccacaactgacacaggaaaccaacacccaaagcatggactaaccccaacgacaggaaaaggtagcttacctgacacaagaggaataagaatggagcagtacatgggaaaggaggcatgcctctgatatgggactgagcctggcccatagaaacatgacactgaccttggagagacacagcgtccctagcagtgaactatttctacacagtgggaactctgacaagggctgacctgcctctcacacacatagattaatggcactgattgttttagagactatggagcctggcacaggactgactctgggatgctcctagtttgacctcacagtgacccttcccaatcagcactgaaaataccatcaggcctaatctcatacctctgaccaacaggctgttctgcactgaaaaggttcttcatccctttccagttaaggaccgtggccctgccctctccttccttcccaaactgttcaagaaataataaattgtttggcttcctcctgaaaaaaaaaaaaaaaaaaaaaaaaaaaaaaaaaaaaaggaattcc

SEQ ID NO: 132 - protein, 447 aa, Homo sapiens
MELLKLNRSVQGTGPGPGASLCRPGAPLLNSSSVGNLSCEPPRIRGAGTRELELAIRITLYAVIFLMSVGGNMLIIVVLGLSRRLRTVTNAFLLSLAVSDLLLAVACMPFTLLPNLMGTFIFGTVICKAVSYLMGVSVSVSTLSLVAIALERYSAICRPLQARVWQTRSHAARVIVATWLLSGLLMVPYPVYTVVQPVGPRVLQCVHRWPSARVRQTWSVLLLLLLFFIPGVVMAVAYGLISRELYLGLRFDGDSDSDSQSRVRNQGGLPGAVHQNGRCRPETGAVGEDSDGCYVQLPRSRPALELTALTAPGPGSGSRPTQAKLLAKKRVVRMLLVIVVLFFLCWLPVYSANTWRAFDGPGAHRALSGAPISFIHLLSYASACVNPLVYCFMHRRFRQACLETCARCCPRPPRARPRALPDEDPPTPSIASLSRLSYTTISTLGPG

SEQ ID NO: 133 - DNA, 2034 bp, Homo sapiens
ggatctggcagcgccgcgaagacgagcggtcaccggcgcccgacccgagcgcgcccagaggacggcggggagccaagccgacccccgagcagcgccgcgcgggccctgaggctcaaaggggcagcttcaggggaggacaccccactggccaggacgccccaggctctgctgctctgccactcagctgccctcggaggagcgtacacacacaccaggactgcattgccccagtgtgcagcccctgccagatgtgggaggcagctagctgcccagaggcatgcccccctgccagccacagcgacccctgctgctgttgctgctgctgctggcctgccagccacaggtcccctccgctcaggtgatggacttcctgtttgagaagtggaagctctacggtgaccagtgtcaccacaacctgagcctgctgccccctcccacggagctggtgtgcaacagaaccttcgacaagtattcctgctggccggacacccccgccaataccacggccaacatctcctgcccctggtacctgccttggcaccacaaagtgcaacaccgcttcgtgttcaagagatgcgggcccgacggtcagtgggtgcgtggaccccgggggcagccttggcgtgatgcctcccagtgccagatggatggcgaggagattgaggtccagaaggaggtggccaagatgtacagcagcttccaggtgatgtacacagtgggctacagcctgtccctgggggccctgctcctcgccttggccatcctggggggcctcagcaagctgcactgcacccgcaatgccatccacgcgaatctgtttgcgtccttcgtgctgaaagccagctccgtgctggtcattgatgggctgctcaggacccgctacagccagaaaattggcgacgacctcagtgtcagcacctggctcagtgatggagcggtggctggctgccgtgtggccgcggtgttcatgcaatatggcatcgtggccaactactgctggctgctggtggagggcctgtacctgcacaacctgctgggcctggccaccctccccgagaggagcttcttcagcctctacctgggcatcggctggggtgcccccatgctgttcgtcgtcccctgggcagtggtcaagtgtctgttcgagaacgtccagtgctggaccagcaatgacaacatgggcttctggtggatcctgcggttccccgtcttcctggccatcctgatcaacttcttcatcttcgtccgcatcgttcagctgctcgtggccaagctgcgggcacggcagatgcaccacacagactacaagttccggctggccaagtccacgctgaccctcatccctctgctgggcgtccacgaagtggtctttgccttcgtgacggacgagcacgcccagggcaccctgcgctccgccaagctcttcttcgacctcttcctcagctccttccagggcctgctggtggctgtcctctactgcttcctcaacaaggaggtgcagtcggagctgcggcggcgttggcaccgctggcgcctgggcaaagtgctatgggaggagcggaacaccagcaaccacagggcctcatcttcgcccggccacggccctcccagcaaggagctgcagtttgggaggggtggtggcagccaggattcatctgcggagacccccttggctggtggcctccctagattggctgagagccccttctgaaccctgctgggaccccagctagggctggactctggcacccagaggcgtcgctggacaacccagaactggacgcccagctgaggctgggggcgggggagccaacagcagcccccacctaccccccacccccagtgtggctgtctgcgagattgggcctcctctccctgcacctgccttgtccctggtgcagaggtgagcagaggagtccagggcgggagtgggggctgtgccgtgaactgcgtgccagtgtccccacgtatgtcggcacgtcccatgtgcatggaaatgtcctccaacaataaagagctcaagtggtcaccgtg

SEQ ID NO: 134 - protein, 477 aa, Homo sapiens
MPPCQPQRPLLLLLLLLACQPQVPSAQVMDFLFEKWKLYGDQCHHNLSLLPPPTELVCNRTFDKYSCWPDTPANTTANISCPWYLPWHHKVQHRFVFKRCGPDGQWVRGPRGQPWRDASQCQMDGEEIEVQKEVAKMYSSFQVMYTVGYSLSLGALLLALAILGGLSKLHCTRNAIHANLFASFVLKASSVLVIDGLLRTRYSQKIGDDLSVSTWLSDGAVAGCRVAAVFMQYGIVANYCWLLVEGLYLHNLLGLATLPERSFFSLYLGIGWGAPMLFVVPWAVVKCLFENVQCWTSNDNMGFWWILRFPVFLAILINFFIFVRIVQLLVAKLRARQMHHTDYKFRLAKSTLTLIPLLGVHEVVFAFVTDEHAQGTLRSAKLFFDLFLSSFQGLLVAVLYCFLNKEVQSELRRRWHRWRLGKVLWEERNTSNHRASSSPGHGPPSKELQFGRGGGSQDSSAETPLAGGLPRLAESPF

SEQ ID NO: 135 - DNA, 2735 bp, Homo sapiens
ttggttgctggtccacttacaaacacttttcatatttgtatgtctttccaatggttatcctgttttgttcatttcaggcatatggccctgatcagattaactgacatgatgtatatgcaaagccttttgagttcttcagaaaaataaattatcttattcaagactgattgcttataaggaacttattatagctaatatagtaggcacaattttttttgtaattctcctagatgagtcagaacttagttttgatgtaggtaaaaattttatggtcacaaatctcaggtgtgagaaaatctctttccttgatactctatataaatagaggatataaatatttcaagtctggaagtagtgagagaagctggtaattctggacatatagtgacagtcaaaaaggagctcaggtacaggactggtctaagctgctcaagattcaggagacagccagtacacagagaagctgaggaaataatacagatatatctaaaacacttatctaaccttctgtggtaacaagctccttaaaggggctggatgatgttgtgttcactttttatcaccagcaaaggctaagataatgtatatagtaaatatttagtaaccatttattaaataaataaatatttaagacagaataaacaagtataataaatgaaccaataagaatgcaccatctaagtcaaaatagccacttttatccttaacattgtacctgctttggctgctgcagaagcaaacttgttggcattagacaaatcaagctggtgatttaataaattccaatgtaagtcttaccagtattgatgaataactatccagcactcaccatgaaagttaaagaagcaacacagaaaaagttcctaagtggtcccaatttgaaatgatcagataacctataaaagaacatattcatattatactaacataaacacatataaatgcacttacagcagttacacagtattctcttcaataactagtttccttatgcattaatgtgtaataacagcaactacaatatttagataattataaaaaccaaggcaataatttaaaaactgattaaccgttttactctaacttaagcatggattggatcagtaagattgattaataaatttgaatgcagtcagttggattgattctaatttaaagttttaatttgttgtagaataattttaagtgaatatatttgtccagtgttcgagtgctcaacagtgtgtttgaaaaggaaaacaaagaatgttttgagaatgtgttaattccttaagacaatggattttaattggatctgttgttttcatttttcttcattatcattatacatctgtatgttggacagaacactaacactaaatagtttttagaaagtgttttttgaagttatttaaatcataatatcatgactgacttttgaattcaaaattaggctgtgactatccttcttcacttaggaagagtgttgtgaaagccagaccatctgctgaggtgctacagttacatgtggccctcagaatgcgtttggcctgctctgttttagcactctgttggattaccaatacacaaaacaagttaacctttgatctttcacattaagtatctcagggacaaaatttgacatacgtctaaacctgtgacgtttccatctaaagaaggcagaaataaaacatggactttagattcggttacaataaaatatcagatgcaccagagacacaaggcttgaagctctgtcctgggaaaatatggcaaacagtgcctctcctgaacagaatcaaaatcactgttcagccatcaacaacagcatcccactgatgcagggcaacctccccactctgaccttgtctggaaagatccgagtgacggttactttcttcctttttctgctctctgcgacctttaatgcttctttcttgttgaaacttcagaagtggacacagaagaaagagaaagggaaaaagctctcaagaatgaagctgctcttaaaacatctgaccttagccaacctgttggagactctgattgtcatgccactggatgggatgtggaacattacagtccaatggtatgctggagagttactctgcaaagttctcagttatctaaagcttttctccatgtatgccccagccttcatgatggtggtgatcagcctggaccgctccctggctatcacgaggcccctagctttgaaaagcaacagcaaagtcggacagtccatggttggcctggcctggatcctcagtagtgtctttgcaggaccacagttatacatcttcaggatgattcatctagcagacagctctggacagacaaaagttttctctcaatgtgtaacacactgcagtttttcacaatggtggcatcaagcattttataactttttcaccttcagctgcctcttcatcatccctcttttcatcatgctgatctgcaatgcaaaaatcatcttcaccctgacacgggtccttcatcaggacccccacgaactacaactgaatcagtccaagaacaatataccaagagcacggctgaagactctaaaaatgacggttgcatttgccacttcatttactgtctgctggactccctactatgtcctaggaatttggtattggtttgatcctgaaatgttaaacaggttgtcagacccagtaaatcacttcttctttctctttgcctttttaaacccatgctttgatccacttatctatggatatttttctctgtga

SEQ ID NO: 136 - protein, 328 aa, Homo sapiens
MANSASPEQNQNHCSAINNSIPLMQGNLPTLTLSGKIRVTVTFFLFLLSATFNASFLLKLQKWTQKKEKGKKLSRMKLLLKHLTLANLLETLIVMPLDGMWNITVQWYAGELLCKVLSYLKLFSMYAPAFMMVVISLDRSLAITRPLALKSNSKVGQSMVGLAWILSSVFAGPQLYIFRMIHLADSSGQTKVFSQCVTHCSFSQWWHQAFYNFFTFSCLFIIPLFIMLICNAKIIFTLTRVLHQDPHELQLNQSKNNIPRARLKTLKMTVAFATSFTVCWTPYYVLGIWYWFDPEMLNRLSDPVNHFFFLFAFLNPCFDPLIYGYFSL

SEQ ID NO: 137 - DNA, 1095 bp, Homo sapiens
atggcccagcagtggagcctccaaaggctcgcaggccgccatccgcaggacagctatgaggacagcacccagtccagcatcttcacctacaccaacagcaactccaccagaggccccttcgaaggcccgaattaccacatcgctcccagatgggtgtaccacctcaccagtgtctggatgatctttgtggtcattgcatccgttttcacaaatgggcttgtgctggcggccaccatgaagttcaagaagctgcgccacccgctgaactggatcctggtgaacctggcggtcgctgacctggcagagaccgtcatcgccagcactatcagcgttgtgaaccaggtctatggctacttcgtgctgggccaccctatgtgtgtcctggagggctacaccgtctccctgtgtgggatcacaggtctctggtctctggccatcatttcctgggagagatggatggtggtctgcaagccctttggcaatgtgagatttgatgccaagctggccatcgtgggcattgccttctcctggatctgggctgctgtgtggacagccccgcccatctttggttggagcaggtactggccccacggcctgaagacttcatgcggcccagacgtgttcagcggcagctcgtaccccggggtgcagtcttacatgattgtcctcatggtcacctgctgcatcaccccactcagcatcatcgtgctctgctacctccaagtgtggctggccatccgagcggtggcaaagcagcagaaagagtctgaatccacccagaaggcagagaaggaagtgacgcgcatggtggtggtgatggtcctggcattctgcttctgctggggaccatacgccttcttcgcatgctttgctgctgccaaccctggctaccccttccaccctttgatggctgccctgccggccttctttgccaaaagtgccactatctacaaccccgttatctatgtctttatgaaccggcagtttcgaaactgcatcttgcagcttttcgggaagaaggttgacgatggctctgaactctccagcgcctccaaaacggaggtctcatctgtgtcctcggtatcgcctgcatga

SEQ ID NO: 138 - protein, 364 aa, Homo sapiens
MAQQWSLQRLAGRHPQDSYEDSTQSSIFTYTNSNSTRGPFEGPNYHIAPRWVYHLTSVWMIFVVIASVFTNGLVLAATMKFKKLRHPLNWILVNLAVADLAETVIASTISVVNQVYGYFVLGHPMCVLEGYTVSLCGITGLWSLAIISWERWMVVCKPFGNVRFDAKLAIVGIAFSWIWAAVWTAPPIFGWSRYWPHGLKTSCGPDVFSGSSYPGVQSYMIVLMVTCCITPLSIIVLCYLQVWLAIRAVAKQQKESESTQKAEKEVTRMVVVMVLAFCFCWGPYAFFACFAAANPGYPFHPLMAALPAFFAKSATIYNPVIYVFMNRQFRNCILQLFGKKVDDGSELSSASKTEVSSVSSVSPA

SEQ ID NO: 139 - DNA, 870 bp, Homo sapiens
atgtggaacgcgacgcccagcgaagagccggggttcaacctcacactggccgacctggactgggatgcttcccccggcaacgactcgctgggcgacgagctgctgcagctcttccccgcgccgctgctggcgggcgtcacagccacctgcgtggcactcttcgtggtgggtatcgctggcaacctgctcaccatgctggtggtgtcgcgcttccgcgagctgcgcaccaccaccaacctctacctgtccagcatggccttctccgatctgctcatcttcctctgcatgcccctggacctcgttcgcctctggcagtaccggccctggaacttcggcgacctcctctgcaaactcttccaattcgtcagtgagagctgcacctacgccacggtgctcaccatcacagcgctgagcgtcgagcgctacttcgccatctgcttcccactccgggccaaggtggtggtcaccaaggggcgggtgaagctggtcatcttcgtcatctgggccgtggccttctgcagcgccgggcccatcttcgtgctagtcggggtggagcacgagaacggcaccgacccttgggacaccaacgagtgccgccccaccgagtttgcggtgcgctctggactgctcacggtcatggtgtgggtgtccagcatcttcttcttccttcctgtcttctgtctcacggtcctctacagtctcatcggcaggaagctgtggcggaggaggcgcggcgatgctgtcgtgggtgcctcgctcagggaccagaaccacaagcaaaccgtgaaaatgctgggtgggtctcagcgcgcgctcaggctttctctcgcgggtcctatcctctccctgtgccttctcccttctctctga

SEQ ID NO: 140 - protein, 289 aa, Homo sapiens
MWNATPSEEPGFNLTLADLDWDASPGNDSLGDELLQLFPAPLLAGVTATCVALFVVGIAGNLLTMLVVSRFRELRTTTNLYLSSMAFSDLLIFLCMPLDLVRLWQYRPWNFGDLLCKLFQFVSESCTYATVLTITALSVERYFAICFPLRAKVVVTKGRVKLVIFVIWAVAFCSAGPIFVLVGVEHENGTDPWDTNECRPTEFAVRSGLLTVMVWVSSIFFFLPVFCLTVLYSLIGRKLWRRRRGDAVVGASLRDQNHKQTVKMLGGSQRALRLSLAGPILSLCLLPSL

SEQ ID NO: 141 - DNA, 1617 bp, Homo sapiens
agcagccaaggcttactgaggctggtggagggagccactgctgggctcaccatggaccgccggatgtggggggcccacgtcttctgcgtgttgagcccgttaccgaccgtattgggccacatgcacccagaatgtgacttcatcacccagctgagagaggatgagagtgcctgtctacaagcagcagaggagatgcccaacaccaccctgggctgccctgcgacctgggatgggctgctgtgctggccaacggcaggctctggcgagtgggtcaccctcccctgcccggatttcttctctcacttcagctcagagtcaggggctgtgaaacgggattgtactatcactggctggtctgagccctttccaccttaccctgtggcctgccctgtgcctctggagctgctggctgaggaggaatcttacttctccacagtgaagattatctacaccgtgggccatagcatctctattgtagccctcttcgtggccatcaccatcctggttgctctcaggaggctccactgcccccggaactacgtccacacccagctgttcaccacttttatcctcaaggcgggacgtgtgttcctgaaggatgctgcccttttccacagcgacgacactgaccactgcagcttctccactgttctatgcaaggtctctgtggccgcctcccatttcgccaccatgaccaacttcagctggctgttggcagaagccgtctacctgaactgcctcctggcctccacctcccccagctcaaggagagccttctggtggctggttctcgctggctgggggctgcccgtgctcttcactggcacgtgggtgagctgcaaactggccttcgaggacatcgcgtgctgggacctggacgacacctccccctactggtggatcatcaaagggcccattgtcctctcggtcggggtgaactttgggctttttctcaatattatccgcatcctggtgaggaaactggagccagctcagggcagcctccatacccagtctcagtattggcgtctctccaagtcgacacttttcctgatcccactctttggaattcactacatcatcttcaacttcctgccagacaatgctggcctgggcatccgcctccccctggagctgggactgggttccttccagggcttcattgttgccatcctctactgcttcctcaaccaagaggtgaggactgagatctcacggaagtggcatggccatgaccctgagcttctgccagcctggaggacccgtgctaagtggaccacgccttcccgctcggcggcaaaggtgctgacatctatgtgctaggctgcctcatcacgccactggagtccacacttgaatttgggcagctaccacgggtctgccatgctctggaggagcaagggggccacatccccaccccagctgttacccagcccggggcaggtgcagcccttcctccctgtctctgcatctgactctcttttgaggtccctgtatgtctacctctgacttctgtggtccctctgtgtctgctctcatccattcctcttactggggcctggggctctagcccaaggctcagaggagccaataaacctgtaaatgaaaaaaaaaaaa

SEQ ID NO: 142 - protein, 423 aa, Homo sapiens
MDRRMWGAHVFCVLSPLPTVLGHMHPECDFITQLREDESACLQAAEEMPNTTLGCPATWDGLLCWPTAGSGEWVTLPCPDFFSHFSSESGAVKRDCTITGWSEPFPPYPVACPVPLELLAEEESYFSTVKIIYTVGHSISIVALFVAITILVALRRLHCPRNYVHTQLFTTFILKAGRVFLKDAALFHSDDTDHCSFSTVLCKVSVAASHFATMTNFSWLLAEAVYLNCLLASTSPSSRRAFWWLVLAGWGLPVLFTGTWVSCKLAFEDIACWDLDDTSPYWWIIKGPIVLSVGVNFGLFLNIIRILVRKLEPAQGSLHTQSQYWRLSKSTLFLIPLFGIHYIIFNFLPDNAGLGIRLPLELGLGSFQGFIVAILYCFLNQEVRTEISRKWHGHDPELLPAWRTRAKWTTPSRSAAKVLTSMC

SEQ ID NO: 143 - DNA, 3870 bp, Homo sapiens
cagggagacatacaggatttaagaagcccatcatggagaagaccttcaattacagagataaaaagtttttcttgtggaacaagttaacactagatggcagataacagactgaggagtgagctgcttctgactcgattaaaaagggagtgagccataactggcggctgctctttcgccaatgagcctccccaattcctcctgcctcttagaagacaagatgtgtgagggcaacaagaccactatggccagcccccagctgatgcccctggtggtggtcctgagcactatctgcttggtcacagtagggctcaacctgctggtgctgtatgccgtacggagtgagcggaagctccacactgtggggaacctgtacatcgtcagcctctcggtggcggacttgatcgtgggtgccgtcgtcatgcctatgaacatcctctacctgctcatgtccaagtggtcactgggccgtcctctctgcctcttttggctttccatggactatgtggccagcacagcgtccattttcagtgtcttcatcctgtgcattgatcgctaccgctctgtccagcagcccctcaggtaccttaagtatcgtaccaagacccgagcctcggccaccattctgggggcctggtttctctcttttctgtgggttattcccattctaggctggaatcacttcatgcagcagacctcggtgcgccgagaggacaagtgtgagacagacttctatgatgtcacctggttcaaggtcatgactgccatcatcaacttctacctgcccaccttgctcatgctctggttctatgccaagatctacaaggccgtacgacaacactgccagcaccgggagctcatcaataggtccctcccttccttctcagaaattaagctgaggccagagaaccccaagggggatgccaagaaaccagggaaggagtctccctgggaggttctgaaaaggaagccaaaagatgctggtggtggatctgtcttgaagtcaccatcccaaacccccaaggagatgaaatccccagttgtcttcagccaagaggatgatagagaagtagacaaactctactgctttccacttgatattgtgcacatgcaggctgcggcagaggggagtagcagggactatgtagccgtcaaccggagccatggccagctcaagacagatgagcagggcctgaacacacatggggccagcgagatatcagaggatcagatgttaggtgatagccaatccttctctcgaacggactcagataccaccacagagacagcaccaggcaaaggcaaattgaggagtgggtctaacacaggcctggattacatcaagtttacttggaagaggctccgctcgcattcaagacagtatgtatctgggttgcacatgaaccgcgaaaggaaggccgccaaacagttgggttttatcatggcagccttcatcctctgctggatcccttatttcatcttcttcatggtcattgccttctgcaagaactgttgcaatgaacatttgcacatgttcaccatctggctgggctacatcaactccacactgaaccccctcatctaccccttgtgcaatgagaacttcaagaagacattcaagagaattctgcatattcgctcctaagggaggctctgaggggatgcaacaaaatgatccttatgatgtccaacaaggaaatagaggacgaaggcctgtgtgttgccaggcaggcacctgggctttctggaatccaaaccacagtcttaggggcttggtagtttggaaagttcttaggcaccatagaagaacagcagatggcggtgatcagcagagagattgaactttgaggaggaagcagaatctttgcaagaaagtcagacctgtttcttgtaactgggttcaaaaagaaaaaaataataaaaataaaagagagagagaatcagacctgggtggaactctcctgctcctcaggaactatgggagcctcagactcattgtaattcaagctttccgagtcaagtgattgacaactgaagagacacgtggctagggttccactggagaattgaaaaggactcttgagccctcctggaatggagctgtataactgtgcagagactttatccatgccaatagttgctgtccccttccaggggtcaccttgagaggcatgacagctgttccacaggggctatcccttctcagaaaacttctcttctgagcctctttaacagctttctccagaaccagtgtctgaaccaccctggaaattctgccttattatttcttactcaaacatgtttagagtggatagaaaattatgcagcttgcacacccatcatctttaaccccaaatttcctttggctattaaaaaagtggtggcaaaaggcatcctcaaaagaaagagaaatgaaatatttttgaatggttgcacgttaaaaattaaaagaaggaatgggggcagaatgccatatttttgagggctgtactaggtttatctcatttaagccccacaacaccccacaggagggtaattttctaactctagtttgcagaggagcaaattgaggttcagcaaggtgagagaggtacccaaggtcacatagctagttatgtgagaaagttagagtacagatcctctggggtttcagcttattgtagcatattttctccgaaaggcaaaaatgtgcccttttggccgggcatggtagctcaagcctataatcccagcatgttgagaggctgaggtgggcagatcatttgaggccaggagttcaagaccagtctggccaatatggagaaaccttgtctctactaaaaacacaaaaattatctgggcatggtggggcatgcctgtagtcccacttacttgggaggccgaggcacgagaatcgcttgaacccgggaggtggaggttgccgtgagccaagatcacgccactgcactccagcctgggcaacagagcaagactctgtctcaaaaaaaaaaatacaatattttaacaatgtgccctcttaagtgtgcacagatacacatacacggtattcccaagagtggtggcagctcaaaatgatatgtttgagtagacgaacagctgacatggagttcccgtgcacctacggaaggggacgctttgaaggaaccaagtgcatttttatctgtgagttctgttgtgtttgtcaaaaagtcattgtaatctttcatagccatacctggtaagcaaaaactagtaaagacataggaacatgtagttttacttggtgtttatgttgcaatctggttgtgatttatattttaaagcttggtgctaaaccacaatatgtatagcacatggagtgcctgtacaagctgatgttttgtattttgtgttcctctttgcatgatctgtcaaagtgagatatttttacctgcctaaaatatgatgtttaaaagcatactctatgtgatttatttatttctacctttctgagtctcttggactaagaagatgttttgaaatgtaccatcaaatgttaacagagtttgatatgggctttctctttggtttctcatcacatttgtaaatgtcttttcaaaaggatttactttttgtaaaaagcttcattctcactctgctttgcatcccccaaacttcttgttcaaaacggggggagtttaggagactttaatcccggtttcagaagctgcagctggtctgtttccaggtcagaaaccattgttcagaagacctccctgtgagagagttgctcctcagggtccctcaggaccaaagaacactcgaaaagagcacttcacacagacaagtggctaagtgtccattatttaccttgaacaatcaaggcaactagtggagagaactgattgtgagctc

SEQ ID NO: 144 - protein, 487 aa, Homo sapiens
MSLPNSSCLLEDKMCEGNKTTMASPQLMPLVVVLSTICLVTVGLNLLVLYAVRSERKLHTVGNLYIVSLSVADLIVGAVVMPMNILYLLMSKWSLGRPLCLFWLSMDYVASTASIFSVFILCIDRYRSVQQPLRYLKYRTKTRASATILGAWFLSFLWVIPILGWNHFMQQTSVRREDKCETDFYDVTWFKVMTAIINFYLPTLLMLWFYAKIYKAVRQHCQHRELINRSLPSFSEIKLRPENPKGDAKKPGKESPWEVLKRKPKDAGGGSVLKSPSQTPKEMKSPVVFSQEDDREVDKLYCFPLDIVHMQAAAEGSSRDYVAVNRSHGQLKTDEQGLNTHGASEISEDQMLGDSQSFSRTDSDTTTETAPGKGKLRSGSNTGLDYIKFTWKRLRSHSRQYVSGLHMNRERKAAKQLGFIMAAFILCWIPYFIFFMVIAFCKNCCNEHLHMFTIWLGYINSTLNPLIYPLCNENFKKTFKRILHIRS

SEQ ID NO: 145 - DNA, 1847 bp, Homo sapiens
ctcctgccctccactgactccagagagggagatccccagtacttgactccatcacgcagatgggagcaggcaccagctatggagagggatacagctgcgtctccacatgacccatcctgcatgacaccaaagccaccgccagacagtgcctcggattctatgcaaaacctgggaagcggagacctaccccagccccgggaggaagctagctcttcaggggaccgtctgaggactggagtttgatccatgaacctggcttcgaggccttgcttttctctcttcttcattcatattcattcccaacaccttagaaggtgttgcttaatttatttctagaaaagcagcccagagtcagtcattgaagccttccccaccccctggccaaaaaaaaaaaaaaaaaaaaactggacacattttggatctgttgggagcttggagtccagtggttggcatagttgtcacattgggagcagagaagaagcaaccaggggccctgatcaggggactgagccgtagagtcccaggatggcacccaatggcacagcctcttccttttgcctggactctaccgcatgcaagatcaccatcaccgtggtccttgcggtcctcatcctcatcaccgttgctggcaatgtggtcgtctgtctggccgtgggcttgaaccgccggctccgcaacctgaccaattgtttcatcgtgtccttggctatcactgacctgctcctcggcctcctggtgctgcccttctctgccatctaccagctgtcctgcaagtggagctttggcaaggtcttctgcaatatctacaccagcctggatgtgatgctctgcacagcctccattcttaacctcttcatgatcagcctcgaccggtactgcgctgtcatggacccactgcggtaccctgtgctggtcaccccagttcgggtcgccatctctctggtcttaatttgggtcatctccattaccctgtcctttctgtctatccacctggggtggaacagcaggaacgagaccagcaagggcaatcataccacctctaagtgcaaagtccaggtcaatgaagtgtacgggctggtggatgggctggtcaccttctacctcccgctactgatcatgtgcatcacctactaccgcatcttcaaggtcgcccgggatcaggccaagaggatcaatcacattagctcctggaaggcagccaccatcagggagcacaaagccacagtgacactggccgccgtcatgggggccttcatcatctgctggtttccctacttcaccgcgtttgtgtaccgtgggctgagaggggatgatgccatcaatgaggtgttagaagccatcgttctgtggctgggctatgccaactcagccctgaaccccatcctgtatgctgcgctgaacagagacttccgcaccgggtaccaacagctcttctgctgcaggctggccaaccgcaactcccacaaaacttctctgaggtccaacgcctctcagctgtccaggacccaaagccgagaacccaggcaacaggaagagaaacccctgaagctccaggtgtggagtgggacagaagtcacggccccccagggagccacagacaggtaatagccctagccattggtgcacaggatgggggcaatgggaggggatgctactgatgggaatgattaagggagctgctgtttaggtggtgctggtttatgttctaggaactcttcatgagcactttgtaaacaccctcttgcttaatcctcccaacggcccccaaaggtagaacttagctcccttttaaaaggagcacattaaaattctcagaggacttggcaagggccgcacagctggggcat

SEQ ID NO: 146 - protein, 359 aa, Homo sapiens
MAPNGTASSFCLDSTACKITITVVLAVLILITVAGNVVVCLAVGLNRRLRNLTNCFIVSLAITDLLLGLLVLPFSAIYQLSCKWSFGKVFCNIYTSLDVMLCTASILNLFMISLDRYCAVMDPLRYPVLVTPVRVAISLVLIWVISITLSFLSIHLGWNSRNETSKGNHTTSKCKVQVNEVYGLVDGLVTFYLPLLIMCITYYRIFKVARDQAKRINHISSWKAATIREHKATVTLAAVMGAFIICWFPYFTAFVYRGLRGDDAINEVLEAIVLWLGYANSALNPILYAALNRDFRTGYQQLFCCRLANRNSHKTSLRSNASQLSRTQSREPRQQEEKPLKLQVWSGTEVTAPQGATDR

SEQ ID NO: 147 - DNA, 1182 bp, Homo sapiens
tgcagcactcaccatggaatccccgattcagatcttccgcggggagcctggccctacctgcgccccgagcgcctgcctgccccccaacagcagcgcctggtttcccggctgggccgagcccgacagcaacggcagcgccggctcggaggacgcgcagctggagcccgcgcacatctccccggccatcccggtcatcatcacggcggtctactccgtagtgttcgtcgtgggcttggtgggcaactcgctggtcatgttcgtgatcatccgatacacaaagatgaagacagcaaccaacatttacatatttaacctggctttggcagatgctttagttactacaaccatgccctttcagagtacggtctacttgatgaattcctggccttttggggatgtgctgtgcaagatagtaatttccattgattactacaacatgttcaccagcatcttcaccttgaccatgatgagcgtggaccgctacattgccgtgtgccaccccgtgaaggctttggacttccgcacacccttgaaggcaaagatcatcaatatctgcatctggctgctgtcgtcatctgttggcatctctgcaatagtccttggaggcaccaaagtcagggaagacgtcgatgtcattgagtgctccttgcagttcccagatgatgactactcctggtgggacctcttcatgaagatctgcgtcttcatctttgccttcgtgatccctgtcctcatcatcatcgtctgctacaccctgatgatcctgcgtctcaagagcgtccggctcctttctggctcccgagagaaagatcgcaacctgcgtaggatcaccagactggtcctggtggtggtggcggttttcgtcgtctgctggactcccattcacatattcatcctggtggaggctctggggagcacctcccacagcacagctgctctctccagctattacttctgcatcgccttaggctataccaacagtagcctgaatcccattctctacgcctttcttgatgaaaacttcaagcggtgtttccgggacttctgctttccactgaagatgaggatggagcggcagagcactagcagagtccgaaatacagttcaggatcctgcttacctgagggacatcgatgggatgaataaaccagtatgactagtcgtggagatgtcttcgtacag

SEQ ID NO: 148 - protein, 380 aa, Homo sapiens
MESPIQIFRGEPGPTCAPSACLPPNSSAWFPGWAEPDSNGSAGSEDAQLEPAHISPAIPVIITAVYSVVFVVGLVGNSLVMFVIIRYTKMKTATNIYIFNLALADALVTTTMPFQSTVYLMNSWPFGDVLCKIVISIDYYNMFTSIFTLTMMSVDRYIAVCHPVKALDFRTPLKAKIINICIWLLSSSVGISAIVLGGTKVREDVDVIECSLQFPDDDYSWWDLFMKICVFIFAFVIPVLIIIVCYTLMILRLKSVRLLSGSREKDRNLRRITRLVLVVVAVFVVCWTPIHIFILVEALGSTSHSTAALSSYYFCIALGYTNSSLNPILYAFLDENFKRCFRDFCFPLKMRMERQSTSRVRNTVQDPAYLRDIDGMNKPV

SEQ ID NO: 149 - DNA, 2995 bp, Homo sapiens
ggccgcccatgaagcagcggttctcggcgctgcagctgctgaagctgctgctgctgctgcagccgccgctgccacgagcgctgcgcgaggcgctctgccctgagccctgcaactgcgtgcccgacggcgccctgcgctgccccggccccacggccggtctcactcgactatcacttgcctacctccctgtcaaagtgatcccatctcaagctttcagaggacttaatgaggtcataaaaattgaaatctctcagattgattccctggaaaggatagaagctaatgcctttgacaacctcctcaatttgtctgaaatactgatccagaacaccaaaaatctgagatacattgagcccggagcatttataaatcttcccggattaaaatacttgagcatctgtaacacaggcatcagaaagtttccagatgttacgaaggtcttctcctctgaatcaaatttcattctggaaatttgtgataacttacacataaccaccataccaggaaatgcttttcaagggatgaataatgaatctgtaacactcaaactatatggaaatggatttgaagaagtacaaagtcatgcattcaatgggacgacactgacttcactggagctaaaggaaaacgtacatctggagaagatgcacaatggagccttccgtggggccacagggccgaaaaccttggatatttcttccaccaaattgcaggccctgccgagctatggcctagagtccattcagaggctaattgccacgtcatcctattctctaaaaaaattgccatcaagagaaacatttgtcaatctcctggaggccacgttgacttaccccagccactgctgtgcttttagaaacttgccaacaaaagaacagaatttttcacattccatttctgaaaacttttccaaacaatgtgaaagcacagtaaggaaagtgagtaacaaaacactttattcttccatgcttgctgagagtgaactgagtggctgggactatgaatatggtttctgcttacccaagacaccccgatgtgctcctgaaccagatgcttttaatccctgtgaagacattatgggctatgacttccttagggtcctgatttggctgattaatattctagccatcatgggaaacatgactgttctttttgttctcctgacaagtcgttacaaacttacagtgcctcgttttctcatgtgcaatctctcctttgcagacttttgcatggggctctatctgctgctcatagcctcagttgattcccaaaccaagggccagtactataaccatgccatagactggcagacagggagtgggtgcagcactgctggctttttcactgtattcgcaagtgaactttctgtctacaccctcaccgtcatcactctagaaagatggcacaccatcacctatgctattcacctggaccaaaagctgcgattaagacatgccattctgattatgcttggaggatggctcttttcttctctaattgctatgttgccccttgtcggtgtcagcaattacatgaaggtcagtatttgcttccccatggatgtggaaaccactctctcacaagtctatatattaaccatcctgattctcaatgtggtggccttcttcataatttgtgcttgctacattaaaatttattttgcagttcgaaacccagaattaatggctaccaataaagatacaaagattgctaagaaaatggcaatcctcatcttcaccgatttcacctgcatggcacctatctctttttttgccatctcagctgccttcaaagtacctcttatcacagtaaccaactctaaagttttactggttcttttttatcccatcaattcttgtgccaatccatttctgtatgcaatattcactaagacattccaaagagatttctttcttttgctgagcaaatttggctgctgtaaacgtcgggctgaactttatagaaggaaagatttttcagcttacacctccaactgcaaaaatggcttcactggatcaaataagccttctcaatccaccttgaagttgtccacattgcactgtcaaggtacagctctcctagacaagactcgctacacagagtgttaactgttacatcagtaactgcattattgaattgttcttaaacctgtaaaaaaaaattacctgtaccagtaattttaacataaagggttggatttaggaaattatttatttttaggtacattaggcaagagacctctacctagtagaaagtgtagtctatgaccactgccacacgtaaaaactatttgtcattgttacatggcataaatatgaagttgagagtgtttagaaatttttatagaaattttgacacagtaattttgtttgatgaatcttttaaaaaacagaggaggtattttgcatatctttttttcattttcgtaatttgtattgcattctataaaaatattagttcataacagatcagaaatttaaaataaggggctttttcctcaggtagtttgaaaaacacactctagagatgcactgttcaattcggtacgcactagccacatgtggctaaattaaaattaaataaaatgagaaatgtagtttctcagttgcactacgtttcaagttctcaatggctacgtcaagttctcaatggctacgtgtgactagtgcttaccatactggacagcacagacacagaatattttcatcaccacagaaagttctatctgttctattatagagacttttatgtatgccctatctggattctacttatttataatttaaggtaaacatctgaaagcacatttcagcctatttgcttagtgaaacattaagctgtagactgtaaactcctcgtgagtaggaaccctgtctcagtgcattttgttttcctgcttcctacctcaagatcttggcaatggtacactacaaatgtgctgagttagaattactctgaagttatgaaacatataatgaaaacaatttttccggcc

SEQ ID NO: 150 - protein, 699 aa, Homo sapiens
MKQRFSALQLLKLLLLLQPPLPRALREALCPEPCNCVPDGALRCPGPTAGLTRLSLAYLPVKVIPSQAFRGLNEVIKIEISQIDSLERIEANAFDNLLNLSEILIQNTKNLRYIEPGAFINLPGLKYLSICNTGIRKFPDVTKVFSSESNFILEICDNLHITTIPGNAFQGMNNESVTLKLYGNGFEEVQSHAFNGTTLTSLELKENVHLEKMHNGAFRGATGPKTLDISSTKLQALPSYGLESIQRLIATSSYSLKKLPSRETFVNLLEATLTYPSHCCAFRNLPTKEQNFSHSISENFSKQCESTVRKVSNKTLYSSMLAESELSGWDYEYGFCLPKTPRCAPEPDAFNPCEDIMGYDFLRVLIWLINILAIMGNMTVLFVLLTSRYKLTVPRFLMCNLSFADFCMGLYLLLIASVDSQTKGQYYNHAIDWQTGSGCSTAGFFTVFASELSVYTLTVITLERWHTITYAIHLDQKLRLRHAILIMLGGWLFSSLIAMLPLVGVSNYMKVSICFPMDVETTLSQVYILTILILNVVAFFIICACYIKIYFAVRNPELMATNKDTKIAKKMAILIFTDFTCMAPISFFAISAAFKVPLITVTNSKVLLVLFYPINSCANPFLYAIFTKTFQRDFFLLLSKFGCCKRRAELYRRKDFSAYTSNCKNGFTGSNKPSQSTLKLSTLHCQGTALLDKTRYTEC

SEQ ID NO: 151 - DNA, 2687 bp, Homo sapiens
acggcgcgctgggctcacactgtcccgccgcggacgggctttgtggttgggggcgcgcgtgcgagtgccagtgagagtgtgggtgcgcgctgtgggccgcggcgcgggtgggtggccgtgcgttcttgcgagccggcctgcaggaggcgaggctcccctggcctcccgcacccagcggcggaccgagcccctggagggaagttgccgcagccgcccgggccgccggccctcctgtcccgcgccaggtacacagcttctcctagcatgacttcgatctgatcagcaaacaagaaaatttgtctcccgtagttctggggcgtgttcaccacctacaaccacagagctgtcatggctgccatctctacttccatccctgtaatttcacagccccagttcacagccatgaatgaaccacagtgcttctacaacgagtccattgccttcttttataaccgaagtggaaagcatcttgccacagaatggaacacagtcagcaagctggtgatgggacttggaatcactgtttgtatcttcatcatgttggccaacctattggtcatggtggcaatctatgtcaaccgccgcttccattttcctatttattacctaatggctaatctggctgctgcagacttctttgctgggttggcctacttctatctcatgttcaacacaggacccaatactcggagactgactgttagcacatggctcctgcgtcagggcctcattgacaccagcctgacggcatctgtggccaacttactggctattgcaatcgagaggcacattacggttttccgcatgcagctccacacacggatgagcaaccggcgggtagtggtggtcattgtggtcatctggactatggccatcgttatgggtgctatacccagtgtgggctggaactgtatctgtgatattgaaaattgttccaacatggcacccctctacagtgactcttacttagtcttctgggccattttcaacttggtgacctttgtggtaatggtggttctctatgctcacatctttggctatgttcgccagaggactatgagaatgtctcggcatagttctggaccccggcggaatcgggataccatgatgagtcttctgaagactgtggtcattgtgcttggggcctttatcatctgctggactcctggattggttttgttacttctagacgtgtgctgtccacagtgcgacgtgctggcctatgagaaattcttccttctccttgctgaattcaactctgccatgaaccccatcatttactcctaccgcgacaaagaaatgagcgccacctttaggcagatcctctgctgccagcgcagtgagaaccccaccggccccacagaaggctcagaccgctcggcttcctccctcaaccacaccatcttggctggagttcacagcaatgaccactctgtggtttagaacggaaactgagatgaggaaccagccgtcctctcttggaggataaacagcctccccctacccaattgccagggcaaggtggggtgtgagagaggagaaaagtcaactcatgtacttaaacactaaccaatgacagtatttgttcctggaccccacaagacttgatatatattgaaaattagcttatgtgacaaccctcatcttgatccccatcccttctgaaagtaggaagttggagctcttgcaatggaattcaagaacagactctggagtgtccatttagactacactaactagacttttaaaagattttgtgtggtttggtgcaagtcagaataaattctggctagttgaatccacaacttcatttatatacaggcttcccttttttatttttaaaggatacgtttcacttaataaacacgtttatgcctatcagcatgtttgtgatggatgagactatggactgcttttaaactaccataattccattttttcccttacataggaaaactgtaagttggaattatcttttgtttagaaagcatgcatgtaatgtatgtatgcagtatgccttacttaaaaagattaaaaggatactaatgttaaatcttctaggaaatagaacctagacttcaaagccagtatttgtttaggtcatgaagcaaacaatgctctaatcacaatattaactgtttaattaaaatgttgtaacaagtataaaacagggaatgtaagtttattaccaaagtgatatgtattccaaaaaagtcatagaagatgaagcactataatattgttcccatatatttaaaatacccaagtacattctaattaccagtatatcagaggaaaattttcgtagtctttgtaaaataatatactcatcatagaaaacttgaaaaatgcagaaatgtataaaaaagcaaaaatgattactgataatatcacaacccagaagtaaccacctttaaaaagcaacccccatgtatgcctatatgtgtattgtatactttttttacataattggagtcatactgtaaacagttttataagtagatctttttcattgcaaaattgccacattttcttatggcattaaaaattttacaaaaacataattttaatggctatattatattccatttaatggatgcaactcagtttatttaaccattcccatgttgttaactatttaggttgtttctaattttcattattataaagttgcagaaatttggtgt

SEQ ID NO: 152 - protein, 364 aa, Homo sapiens [sequence omitted]

SEQ ID NO: 153 - DNA, 2416 bp, Homo sapiens
ttttgtatttgttgcaccctaagtctgttcatttccttctcctcagctgacatttggagcatagcagtcgatgatgcccacacagacactgcctgagactcacgcccctggagaaacgcagatttccttattttccaggtcaagtcctgccagccatagaaaggacttctttggtgccaactgctgtgaaatgcctgccttggaaatctcagtgctcccttgtacctgtctgagcccagggaaatgccatactgtggcactgctgcatcctgtatggctacccaaggatgcccaggactggtttgaaagagatgagacatggccaggtgcgtggctcacgcttgtaatccagcactttgggaggtcaaggcagtggatcacaaggtcagagttgagaccagccaggccaatatggtgaaaaccccatctctactaaaaatacaaaaaattagccgggcaatggtggtgggtgcctgtagttccagctagtcaggaggccgaggcaggagaatcgcttgaacctggaaggtggaggttccagtgagctgagatcgcgccactgcactccagcctgggtgacagagtgagactccaactcaaaaaaaaaaaaaaaaaagagatgagacactagtgtctcatgagtagaacctggaccagacacaaatctccattcccaatgtttagtgcctcattagtgcccaacaacaagatattgggtctatgtgggtaggcctggggcatcctgtacaacaggagatgtgttaggggagggagaacagatcacaaattcatggagagctatttgcagagcagatactcccatccactctgatatgtagttaatgttcagctgttcctaaaaagcacacccaacaatgggtgttctattccagcctaggaaaatgtagaggcaaggggtctgaggccagaggacaccactagatggaccactgctcctgactgtgatgttgtggcccactcaggtcccagcaccccatggtctgggggaaaatttgctggttcagccagagggctggatggacagtgtttgctgagtcacagatatctctctcatgtagcctttgtctccacagtggtgaccaggaggcacagaacccaaacctggtatctcagctctgtggcgtctttcttcaaaatgagacgaatgaaaccatacatatgcagatgagcatggcagtgggacagcaggccctgcccttgaatatcattgcccccaaggctgtgctggtctccctctgtggggtcttattgaatggcactgtcttctggctgctttgctgtggggccacgaatccctacatggtatacatcctccacctggtcgctgctgacgtgatctatctttgctgctcggcagtggggttcttacaggtgactctgctaacttatcatggagtcgtgttttttatccctgatttcctggccatattgtctcccttctcctttgaggtgtgtctctgtctcctggtggccatcagcacagagcggtgtgtgtgtgtcctcttccccatctggtacagatgccaccgcccaaaatacacatctaatgttgtctgcaccctcatctggggcctgcctttttgcatcaacatagtaaaatcacttttcctaacttactggaaacatgtaaaggcatgtgtcatatttctaaagctttctgggctcttccatgctatcctttcacttgtgatgtgtgtgtcgagtctgactctactcattagattcctgtgctgctcccagcagcaaaaggccaccagggtctatgcggtggtgcagatctcggcccccatgttcctactctgggccctacccctgagcgtggcacccctcataacagatttcaaaatgtttgtcaccacctcctatttaatttccttgttcctcattataaacagcagcgccaaccctatcatttatttctttgtggggagcctcagaaagaaaaggctgaaggaatctctcagagtgattctccaacgggcgttagcagataagccagaggtggggaggaacaaaaaggcagctggcatcgacccaatggagcaaccacactctactcagcatgtggagaaccttcttcccagggagcacagggtcgatgtggaaacataatttcccacatctgagctggggaattgtacacatagtaacccagcctgttctgcatcataaggctgctgcatcaaatcaatgctttattctaatcaagttcagctttcatggactttcaaaacaaccccttgctgtttgtggttggaagagacattaacttccttcctaggcagtaagcccagtttgaatgtgctccagttccaacgatgaggggaatgggacccagtgagactttcctggtacctgtggaatccaaataaagaccatacaaaggcatgaattc

SEQ ID NO: 154 - protein, 378 aa, Homo sapiens
MVWGKICWFSQRAGWTVFAESQISLSCSLCLHSGDQEAQNPNLVSQLCGVFLQNETNETIHMQMSMAVGQQALPLNIIAPKAVLVSLCGVLLNGTVFWLLCCGATNPYMVYILHLVAADVIYLCCSAVGFLQVTLLTYHGVVFFIPDFLAILSPFSFEVCLCLLVAISTERCVCVLFPIWYRCHRPKYTSNVVCTLIWGLPFCINIVKSLFLTYWKHVKACVIFLKLSGLFHAILSLVMCVSSLTLLIRFLCCSQQQKATRVYAVVQISAPMFLLWALPLSVAPLITDFKMFVTTSYLISLFLIINSSANPIIYFFVGSLRKKRLKESLRVILQRALADKPEVGRNKKAAGIDPMEQPHSTQHVENLLPREHRVDVET

SEQ ID NO: 155 - DNA, 1083 bp, Homo sapiens
atgagcatccaaaagaagtatctggagggagattttgtctttcctgtgagcagcagcagcttcctacggaccctgctggagccccagctcggatcagcccttctgacagcaatgaatgcttcgtgctgcctgccctctgttcagccaacactgcctaatggctcggagcacctccaagcccctttcttcagcaaccagagcagcagcgccttctgtgagcaggtcttcatcaagcccgagattttcctgtctctgggcatcgtcagtctgctggaaaacatcctggttatcctggccgtggtcaggaacggcaacctgcactccccgatgtacttctttctctgcagcctggcggtggccgacatgctggtaagtgtgtccaatgccctggagaccatcatgatcgccatcgtccacagcgactacctgaccttcgaggaccagtttatccagcacatggacaacatcttcgactccatgatctgcatctccctggtggcctccatctgcaacctcctggccatcgccgtcgacaggtacgtcaccatcttttacgcgctccgctaccacagcatcatgaccgtgaggaaggccctcaccttgatcgtggccatctgggtctgctgcggcgtctgtggcgtggtgttcatcgtctactcggagagcaaaatggtcattgtgtgcctcatcaccatgttcttcgccatgatgctcctcatgggcaccctctacgtgcacatgttcctctttgcgcggctgcacgtcaagcgcatagcagcactgccacctgccgacggggtggccccacagcaacactcatgcatgaagggggcagtcaccatcaccattctcctgggcgtgttcatcttctgctgggcccccttcttcctccacctggtcctcatcatcacctgccccaccaacccctactgcatctgctacactgcccacttcaacacctacctggtcctcatcatgtgcaactccgtcatcgacccactcatctacgctttccggagcctggaattgcgcaacacctttagggagattctctgtggctgcaacggcatgaacttgggatag

SEQ ID NO: 156 - protein, 360 aa, Homo sapiens [sequence omitted]

SEQ ID NO: 157 - DNA, 999 bp, Homo sapiens
atggtgaactccacccaccgtgggatgcacacttctctgcacctctggaaccgcagcagttacagactgcacagcaatgccagtgagtcccttggaaaaggctactctgatggagggtgctacgagcaactttttgtctctcctgaggtgtttgtgactctgggtgtcatcagcttgttggagaatatcttagtgattgtggcaatagccaagaacaagaatctgcattcacccatgtactttttcatctgcagcttggctgtggctgatatgctggtgagcgtttcaaatggatcagaaaccattatcatcaccctattaaacagtacagatacggatgcacagagtttcacagtgaatattgataatgtcattgactcggtgatctgtagctccttgcttgcatccatttgcagcctgctttcaattgcagtggacaggtactttactatcttctatgctctccagtaccataacattatgacagttaagcgggttgggatcatcataagttgtatctgggcagcttgcacggtttcaggcattttgttcatcatttactcagatagtagtgctgtcatcatctgcctcatcaccatgttcttcaccatgctggctctcatggcttctctctatgtccacatgttcctgatggccaggcttcacattaagaggattgctgtcctccccggcactggtgccatccgccaaggtgccaatatgaagggagcgattaccttgaccatcctgattggcgtctttgttgtctgctgggccccattcttcctccacttaatattctacatctcttgtcctcagaatccatattgtgtgtgcttcatgtctcactttaacttgtatctcatactgatcatgtgtaattcaatcatcgatcctctgatttatgcactccggagtcaagaactgaggaaaaccttcaaagagatcatctgttgctatcccctgggaggcctttgtgacttgtctagcagatattaa

SEQ ID NO: 158 - protein, 332 aa, Homo sapiens
MVNSTHRGMHTSLHLWNRSSYRLHSNASESLGKGYSDGGCYEQLFVSPEVFVTLGVISLLENILVIVAIAKNKNLHSPMYFFICSLAVADMLVSVSNGSETIIITLLNSTDTDAQSFTVNIDNVIDSVICSSLLASICSLLSIAVDRYFTIFYALQYHNIMTVKRVGIIISCIWAACTVSGILFIIYSDSSAVIICLITMFFTMLALMASLYVHMFLMARLHIKRIAVLPGTGAIRQGANMKGAITLTILIGVFVVCWAPFFLHLIFYISCPQNPYCVCFMSHFNLYLILIMCNSIIDPLIYALRSQELRKTFKEIICCYPLGGLCDLSSRY

SEQ ID NO: 159 - DNA, 978 bp, Homo sapiens
atgaattcctcatttcacctgcatttcttggatctcaacctgaatgccacagagggcaacctttcaggacccaatgtcaaaaacaagtcttcaccatgtgaagacatgggcattgctgtggaggtgtttctcactctgggtgtcatcagcctcttggagaacatcttggtcataggggccatagtgaagaacaaaaacctgcactcccccatgtacttcttcgtgtgcagcctggcagtggcggacatgctggtgagcatgtccagtgcctgggagaccatcaccatctacctactcaacaacaagcacctagtgatagcagacgcctttgtgcgccacattgacaatgtgtttgactccatgatctgcatttccgtggtggcatccatgtgcagcttactggccattgcagtggataggtacgtcaccatcttctacgccctgcgctaccaccacatcatgacggcgaggcgctcaggggccatcatcgccggcatctgggctttctgcacgggctgcggcattgtcttcatcctgtactcagaatccacctacgtcatcctgtgcctcatctccatgttcttcgctatgctgttcctcctggtgtctctgtacatacacatgttcctcctggcgcggactcacgtcaagcggatcgcggctctgcccggggccagctctgcgcggcagaggaccagcatgcagggcgcggtcaccgtcaccatgctgctgggcgtgtttaccgtgtgctgggccccgttcttccttcatctcactttaatgctttcttgccctcagaacctctactgctctcgcttcatgtctcacttcaatatgtacctcatactcatcatgtgtaattccgtgatggaccctctcatatatgccttccgcagccaagagatgcggaagacctttaaggagattatttgctgccgtggtttcaggatcgcctgcagctttcccagaagggattaa

SEQ ID NO: 160 - protein, 325 aa, Homo sapiens
MNSSFHLHFLDLNLNATEGNLSGPNVKNKSSPCEDMGIAVEVFLTLGVISLLENILVIGAIVKNKNLHSPMYFFVCSLAVADMLVSMSSAWETITIYLLNNKHLVIADAFVRHIDNVFDSMICISVVASMCSLLAIAVDRYVTIFYALRYHHIMTARRSGAIIAGIWAFCTGCGIVFILYSESTYVILCLISMFFAMLFLLVSLYIHMFLLARTHVKRIAALPGASSARQRTSMQGAVTVTMLLGVFTVCWAPFFLHLTLMLSCPQNLYCSRFMSHFNMYLILIMCNSVMDPLIYAFRSQEMRKTFKEIICCRGFRIACSFPRRD

SEQ ID NO: 161 - DNA, 1270 bp, Homo sapiens
ggagagggtgtgagggcagatctgggggtgcccagatggaaggaggcaggcatgggggacacccaaggccccctggcagcaccatgaactaagcaggacacctggaggggaagaactgtggggacctggaggcctccaacgactccttcctgcttcctggacaggactatggctgtgcagggatcccagagaagacttctgggctccctcaactccacccccacagccatcccccagctggggctggctgccaaccagacaggagcccggtgcctggaggtgtccatctctgacgggctcttcctcagcctggggctggtgagcttggtggagaacgcgctggtggtggccaccatcgccaagaaccggaacctgcactcacccatgtactgcttcatctgctgcctggccttgtcggacctgctggtgagcgggagcaacgtgctggagacggccgtcatcctcctgctggaggccggtgcactggtggcccgggctgcggtgctgcagcagctggacaatgtcattgacgtgatcacctgcagctccatgctgtccagcctctgcttcctgggcgccatcgccgtggaccgctacatctccatcttctacgcactgcgctaccacagcatcgtgaccctgccgcgggcgcggcaagccgttgcggccatctgggtggccagtgtcgtcttcagcacgctcttcatcgcctactacgaccacgtggccgtcctgctgtgcctcgtggtcttcttcctggctatgctggtgctcatggccgtgctgtacgtccacatgctggcccgggcctgccagcacgcccagggcatcgcccggctccacaagaggcagcgcccggtccaccagggctttggccttaaaggcgctgtcaccctcaccatcctgctgggcattttcttcctctgctggggccccttcttcctgcatctcacactcatcgtcctctgccccgagcaccccacgtgcggctgcatcttcaagaacttcaacctctttctcgccctcatcatctgcaatgccatcatcgaccccctcatctacgccttccacagccaggagctccgcaggacgctcaaggaggtgctgacatgctcctggtgagcgcggtgcacgcgctttaagtgtgctgggcagagggaggtggtgatattgtgtggtctggttcctgtgtgaccctgggcagttccttacctccctggtccccgtttgtcaaagaggatggactaaatgatctctgaaagtgttgaag

SEQ ID NO: 162 - protein, 317 aa, Homo sapiens
MAVQGSQRRLLGSLNSTPTAIPQLGLAANQTGARCLEVSISDGLFLSLGLVSLVENALVVATIAKNRNLHSPMYCFICCLALSDLLVSGSNVLETAVILLLEAGALVARAAVLQQLDNVIDVITCSSMLSSLCFLGAIAVDRYISIFYALRYHSIVTLPRARQAVAAIWVASVVFSTLFIAYYDHVAVLLCLVVFFLAMLVLMAVLYVHMLARACQHAQGIARLHKRQRPVHQGFGLKGAVTLTILLGIFFLCWGPFFLHLTLIVLCPEHPTCGCIFKNFNLFLALIICNAIIDPLIYAFHSQELRRTLKEVLTCSW

SEQ ID NO: 163 - DNA, 2049 bp, Homo sapiens
ccggcggagccttaacaagtggtcgggcgggcggacgaggcgggcgatggccctgcggccgggacgcgaacagggaccatgcagggcaacggcagcgcgctgcccaacgcctcccagcccgtgctccgcggggacggcgcgcggccctcgtggctggcgtccgccctagcctgcgtcctcatcttcaccatcgtggtggacatcctgggcaacctcctggtcatcctgtcggtgtatcggaacaagaagctcaggaacgcaggaaacatctttgtggtgagcttagcggtggcagacctggtggtggccatttatccgtacccgttggtgctgatgtcgatatttaacaacgggtggaacctgggctatctgcactgccaagtcagtgggttcctgatgggcctgagcgtcatcggctccatattcaacatcaccggcatcgccatcaaccgctactgctacatctgccacagtctcaagtacgacaaactgtacagcagcaagaactccctctgctacgtgctcctcatatggctcctgacgctggcggccgtcctgcccaacctccgtgcagggactctccagtacgacccgaggatctactcgtgcaccttcgcccagtccgtcagctccgcctacaccatcgccgtggtggttttccacttcctcgtccccatgatcatagtcatcttctgttacctgagaatatggatcctggttctccaggtcagacagagggtgaaacctgaccgcaaacccaaactgaaaccacaggacttcaggaattttgtcaccatgtttgtggtttttgtcctctttgccatttgctgggctcctctgaacttcattggcctggccgtggcctctgaccccgccagcatggtgcctaggatcccagagtggctgtttgtggccagttactacatggcgtatttcaacagctgcctcaatgccattatatacgggctactgaaccaaaatttcaggaaggaatacaggagaattatagtctcgctctgtacagccagggtgttctttgtggacagctctaacgacgtggccgatagggttaaatggaaaccgtctccactgatgaccaacaataatgtagtaaaggtggactccgtttaaaaaagcaccacgttccgggtgagatggacacgctgcgcaaggcctcgctcttgacagatgtctgggaaagcagagtggtggaggaaacttccaacttttacctggctgctgccatagtttctgagctaacgtgctgtcagcattataaacccctccaatctactagtcaagagaagtacagaatgtatggagagttacatgttaactgaggaatgcggttcagggctggggtgagagtaagctgctgaatgcattcaggggaaggagtgtgcaaacttttattgtaaatgagtgccacaaaaggggtaattgcattcttcttcactttttgaagacttctagcagaaaaatgaaagagaattttatttataaatgagcaaatggaacaattttttttctgtaaatggaacaaacaatgaaagtggggtgagtgcctcttattacagagggaaaggctgaacataaatcagttaatggctcatcaacaatcacaaccacaaccaacaccacaaacctttcagctggcagagttagcattgggtagctatactcatggtcataaatgtttgccgctctatattacaagttgtgcatgcaaccagataaagaactaaatcataggccgggcacagtcgctcacacctgtaatctcagcactttgggaggctgaggtgggcagatcaactgagttcaggagtttgagaccaccctggggcaacatgatgaaatcccatctctaaaaaaatacaaaaaattatctgggcatggtgcacacgcctgtaatcccagctactcaggagactgagttaggagaatcccttgagccccagaggcagaggttgtggtgagccgagatcgcgccagtacattccaacttaggctacagaatgagactctgcccaaaaaaaaaaaaaaaaa

SEQ ID NO: 164 - protein, 350 aa, Homo sapiens [sequence omitted]

SEQ ID NO: 165 - DNA, 1662 bp, Homo sapiens
acgcgagctgggcagggaagagagcgcccggctcagtactgcgcgcgccctgcggctgtccggggccgcgcggtggccaaagcacagcgcgggagagtctgcgatgtcagagaacggctccttcgccaactgctgcgaggcgggcgggtgggcagtgcgcccgggctggtcgggggctggcagcgcgcggccctccaggacccctcgacctccctgggtggctccagcgctgtccgcggtgctcatcgtcaccaccgccgtggacgtcgtgggcaacctcctggtgatcctctccgtgctcaggaaccgcaagctccggaacgcaggtaatttgttcttggtgagtctggcattggctgacctggtggtggccttctacccctacccgctaatcctcgtggccatcttctatgacggctgggccctgggggaggagcactgcaaggccagcgcctttgtgatgggcctgagcgtcatcggctctgtcttcaatatcactgccatcgccattaaccgctactgctacatctgccacagcatggcctaccaccgaatctaccggcgctggcacacccctctgcacatctgcctcatctggctcctcaccgtggtggccttgctgcccaacttctttgtggggtccctggagtacgacccacgcatctattcctgcaccttcatccagaccgccagcacccagtacacggcggcagtggtggtcatccacttcctcctccctatcgctgtcgtgtccttctgctacctgcgcatctgggtgctggtgcttcaggcccgcaggaaagccaagccagagagcaggctgtgcctgaagcccagcgacttgcggagctttctaaccatgtttgtggtgtttgtgatctttgccatctgctgggctccacttaactgcatcggcctcgctgtggccatcaacccccaagaaatggctccccagatccctgaggggctatttgtcactagctacttactggcttatttcaacagctgcctgaatgccattgtctatgggctcttgaaccaaaacttccgcagggaatacaagaggatcctcttggccctttggaacccacggcactgcattcaagatgcttccaagggcagccacgcggaggggctgcagagcccagctccacccatcattggtgtgcagcaccaggcagatgctctctagcctggatctgaggcacaccagcagcatgacaaactcatgaaatggtgggagagagtctgctgcaagggtgagaccaggcagcctgctgggccacactgtcctgttggcatcacagccccaaggctgggggaacttcatgctgggacaagcagcccatcaacgccatgggttcaggctgatccaggagatgctcacaggccacaggacctggaaaacactcttggtggtgtcttggggatttggtgcacacaagaccaaggaaaggacagaatgaggaaaggcctggggcagaagagcccaactccttctcatagctgaccctcatcctcctgccttggcctcctggctgctttctccccttccccccagcatggcaggatctcttcctgttagcaaggatgaaagagagaggtcagtaggactggaacttggtaactacaagggcctcaggtggggcaggtgcagagggc

SEQ ID NO: 166 - protein, 362 aa, Homo sapiens
MSENGSFANCCEAGGWAVRPGWSGAGSARPSRTPRPPWVAPALSAVLIVTTAVDVVGNLLVILSVLRNRKLRNAGNLFLVSLALADLVVAFYPYPLILVAIFYDGWALGEEHCKASAFVMGLSVIGSVFNITAIAINRYCYICHSMAYHRIYRRWHTPLHICLIWLLTVVALLPNFFVGSLEYDPRIYSCTFIQTASTQYTAAVVVIHFLLPIAVVSFCYLRIWVLVLQARRKAKPESRLCLKPSDLRSFLTMFVVFVIFAICWAPLNCIGLAVAINPQEMAPQIPEGLFVTSYLLAYFNSCLNAIVYGLLNQNFRREYKRILLALWNPRHCIQDASKGSHAEGLQSPAPPIIGVQHQADAL

SEQ ID NO: 167 - DNA, 1939 bp, Homo sapiens
tgtttgctgtctggacctggctgctgatcctgagcctgctgggagatcttaacgatccccaggagcaacatggggcccaccctagcggttcccaccccctatggctgtattggctgtaagctaccccagccagaatacccaccggctctaatcatctttatgttctgcgcgatggttatcaccatcgttgtagacctaatcggcaactccatggtcattttggctgtgacgaagaacaagaagctccggaattctggcaacatcttcgtggtcagtctctctgtggccgatatgctggtggccatctacccataccctttgatgctgcatgccatgtccattgggggctgggatctgagccagttacagtgccagatggtcgggttcatcacagggctgagtgtggtcggctccatcttcaacatcgtggcaatcgctatcaaccgttactgctacatctgccacagcctccagtacgaacggatcttcagtgtgcgcaatacctgcatctacctggtcatcacctggatcatgaccgtcctggctgtcctgcccaacatgtacattggcaccatcgagtacgatcctcgcacctacacctgcatcttcaactatctgaacaaccctgtcttcactgttaccatcgtctgcatccacttcgtcctccctctcctcatcgtgggtttctgctacgtgaggatctggaccaaagtgctggcggcccgtgaccctgcagggcagaatcctgacaaccaacttgctgaggttcgcaattttctaaccatgtttgtgatcttcctcctctttgcagtgtgctggtgccctatcaacgtgctcactgtcttggtggctgtcagtccgaaggagatggcaggcaagatccccaactggctttatcttgcagcctacttcatagcctacttcaacagctgcctcaacgctgtgatctacgggctcctcaatgagaatttccgaagagaatactggaccatcttccatgctatgcggcaccctatcatattcttccctggcctcatcagtgatattcgtgagatgcaggaggcccgtaccctggcccgcgcccgtgcccatgctcgcgaccaagctcgtgaacaagaccgtgcccatgcctgtcctgctgtggaggaaaccccgatgaatgtccggaatgttccattacctggtgatgctgcagctggccaccccgaccgtgcctctggccaccctaagccccattccagatcctcctctgcctatcgcaaatctgcctctacccaccacaagtctgtctttagccactccaaggctgcctctggtcacctcaagcctgtctctggccactccaagcctgcctctggtcaccccaagtctgccactgtctaccctaagcctgcctctgtccatttcaagggtgactctgtccatttcaagggtgactctgtccatttcaagcctgactctgttcatttcaagcctgcttccagcaaccccaagcccatcactggccaccatgtctctgctggcagccactccaagtctgccttcagtgctgccaccagccaccctaaacccatcaagccagctaccagccatgctgagcccaccactgctgactatcccaagcctgccactaccagccaccctaagcccgctgctgctgacaaccctgagctctctgcctcccattgccccgagatccctgccattgcccaccctgtgtctgacgacagtgacctccctgagtcggcctctagccctgccgctgggcccaccaagcctgctgccagccagctggagtctgacaccatcgctgaccttcctgaccctactgtagtcactaccagtaccaatgattaccatgatgtcgtggttgttgatgttgaagatgatcctgatgaaatggctgtgtgaaaaatgctctcgtaggtggccaggcagt

SEQ ID NO: 168 - protein, 613 aa, Homo sapiens
MGPTLAVPTPYGCIGCKLPQPEYPPALIIFMFCAMVITIVVDLIGNSMVILAVTKNKKLRNSGNIFVVSLSVADMLVAIYPYPLMLHAMSIGGWDLSQLQCQMVGFITGLSVVGSIFNIVAIAINRYCYICHSLQYERIFSVRNTCIYLVITWIMTVLAVLPNMYIGTIEYDPRTYTCIFNYLNNPVFTVTIVCIHFVLPLLIVGFCYVRIWTKVLAARDPAGQNPDNQLAEVRNFLTMFVIFLLFAVCWCPINVLTVLVAVSPKEMAGKIPNWLYLAAYFIAYFNSCLNAVIYGLLNENFRREYWTIFHAMRHPIIFFPGLISDIREMQEARTLARARAHARDQAREQDRAHACPAVEETPMNVRNVPLPGDAAAGHPDRASGHPKPHSRSSSAYRKSASTHHKSVFSHSKAASGHLKPVSGHSKPASGHPKSATVYPKPASVHFKGDSVHFKGDSVHFKPDSVHFKPASSNPKPITGHHVSAGSHSKSAFSAATSHPKPIKPATSHAEPTTADYPKPATTSHPKPAAADNPELSASHCPEIPAIAHPVSDDSDLPESASSPAAGPTKPAASQLESDTIADLPDPTVVTTSTNDYHDVVVVDVEDDPDEMAV

SEQ ID NO: 169 - DNA, 6619 bp, Homo sapiens
gaattcccttacaaacgcctccagcttgtagaggcggtcgtggaggacccagaggaggagacgaaggggaaggaggcggtggtggaggaggcaaaggccttggacgaccattgttggcgaggggcaccactccgggagaggcggcgctgggcgtcttgggggtgcgcgccgggagcctgcagcgggaccagcgtgggaacgcggctggcaggctgtggacctcgtcctcaccaccatggtcgggctccttttgttttttttcccagcgatctttttggaggtgtcccttctccccagaagccccggcaggaaagtgttgctggcaggagcgtcgtctcagcgctcggtggccagaatggacggagatgtcatcattggagccctcttctcagtccatcaccagcctccggccgagaaagtgcccgagaggaagtgtggggagatcagggagcagtatggcatccagagggtggaggccatgttccacacgttggataagatcaacgcggacccggtcctcctgcccaacatcaccctgggcagtgagatccgggactcctgctggcactcttccgtggctctggaacagagcattgagttcattagggactctctgatttccattcgagatgagaaggatgggatcaaccggtgtctgcctgacggccagtccctccccccaggcaggactaagaagcccattgcgggagtgatcggtcccggctccagctctgtagccattcaagtgcagaacctgctccagctcttcgacatcccccagatcgcttattcagccacaagcatcgacctgagtgacaaaactttgtacaaatacttcctgagggttgtcccttctgacactttgcaggcaagggccatgcttgacatagtcaaacgttacaattggacctatgtctctgcagtccacacggaagggaattatggggagagcggaatggacgctttcaaagagctggctgcccaggaaggcctctgtatcgcccattctgacaaaatctacagcaacgctggggagaagagctttgaccgactcttgcgcaaactccgagagaggcttcccaaggctagagtggtggtctgcttctgtgaaggcatgacagtgcgaggactcctgagcgccatgcggcgccttggcgtcgtgggcgagttctcactcattggaagtgatggatgggcagacagagatgaagtcattgaaggttatgaggtggaagccaacgggggaatcacgataaagctgcagtctccagaggtcaggtcatttgatgattatttcctgaaactgaggctggacactaacacgaggaatccctggttccctgagttctggcaacatcggttccagtgccgccttccaggacaccttctggaaaatcccaactttaaacgaatctgcacaggcaatgaaagcttagaagaaaactatgtccaggacagtaagatggggtttgtcatcaatgccatctatgccatggcacatgggctgcagaacatgcaccatgccctctgccctggccacgtgggcctctgcgatgccatgaagcccatcgacggcagcaagctgctggacttcctcatcaagtcctcattcattggagtatctggagaggaggtgtggtttgatgagaaaggagacgctcctggaaggtatgatatcatgaatctgcagtacactgaagctaatcgctatgactatgtgcacgttggaacctggcatgaaggagtgctgaacattgatgattacaaaatccagatgaacaagagtggagtggtgcggtctgtgtgcagtgagccttgcttaaagggccagattaaggttatacggaaaggagaagtgagctgctgctggatttgcacggcctgcaaagagaatgaatatgtgcaagatgagttcacctgcaaagcttgtgacttgggatggtggcccaatgcagatctaacaggctgtgagcccattcctgtgcgctatcttgagtggagcaacatcgaatccattatagccatcgccttttcatgcctgggaatccttgttaccttgtttgtcaccctaatctttgtactgtaccgggacacaccagtggtcaaatcctccagtcgggagctctgctacatcatcctagctggcatcttccttggttatgtgtgcccattcactctcattgccaaacctactaccacctcctgctacctccagcgcctcttggttggcctctcctctgcgatgtgctactctgctttagtgactaaaaccaatcgtattgcacgcatcctggctggcagcaagaagaagatctgcacccggaagcccaggttcatgagtgcctgggctcaggtgatcattgcctcaattctgattagtgtgcaactaaccctggtggtaaccctgatcatcatggaaccccctatgcccattctgtcctacccaagtatcaaggaagtctaccttatctgcaataccagcaacctgggtgtggtggcccctttgggctacaatggactcctcatcatgagctgtacctactatgccttcaagacccgcaacgtgcccgccaacttcaacgaggccaaatatatcgcgttcaccatgtacaccacctgtatcatctggctagcttttgtgcccatttactttgggagcaactacaagatcatcacaacttgctttgcagtgagtctcagtgtaacagtggctctggggtgcatgttcactcccaagatgtacatcattattgccaagcctgagaggaatgtccgcagtgccttcaccacctctgatgttgtccgcatgcatgttggcgatggcaagctgccctgccgctccaacactttcctcaacatcttccgaagaaagaaggcaggggcagggaatgccaattctaatggcaagtctgtgtcatggtctgaaccaggtggaggacaggtgcccaagggacagcatatgtggcaccgcctctctgtgcacgtgaagaccaatgagacggcctgcaaccaaacagccgtcatcaaacccctcactaaaagttaccaaggctctggcaagagcctgaccttttcagataccagcaccaagaccctttacaacgtagaggaggaggaggatgcccagccgattcgctttagcccgcctggtagcccttccatggtggtgcacaggcgcgtgccaagcgcggcgaccactccgcctctgccgccccacctgaccgcagaggagacccccctcttcctggccgaaccagccctccccaagggcttgccccctcctctccagcagcagcagcaaccccctccacagcagaaatcgctgatggaccagctccagggagtggtcagcaacttcagtaccgcgatcccggattttcacgcggtgctggcaggccccgggggtcccgggaacgggctgcggtccctgtacccgcccccgccaccgccgcagcacctgcagatgctgccgctgcagctgagcacctttggggaggagctggtctccccgcccgcggacgacgacgacgacagcgagaggtttaagctcctccaggagtacgtgtatgagcacgagcgggaagggaacacggaagaagacgaactggaagaggaggaggaggacctgcaggcggccagcaaactgaccccggatgattcgcctgcgctgacgcctccgtcgcctttccgcgactcggtggcctcgggcagctcggtgcccagctccccagtgtccgagtcggtgctctgcacccctcccaacgtatcctacgcctctgtcattctgcgggactacaagcaaagctcttccaccctgtaagggggaagggtccacatagaaaagcaagacaagccagagatctcccacacctccagagatgtgcaaacagctgggaggaaaagcctgggagtggggggcctcgtcgggaggacaggagaccgctgctgctgctgccgctactgctgctgctgccttaagtaggaagagagggaaggacaccaagcaaaaaatgttcaggccaggattcggattcttgaattactcgaagccttctctgggaagaaagggaattctgacaaagcacaattccatatggtatgtaacttttatcacaaatcaaatagtgacatcacaaacataatgtcctcttttgcacaattgtgcatagatatatatatgcccacacacactgggccatgcttggcaaggaacagaccacgtggcatccagtcggatcatgagttcacctgatgcattcggagtgagctggtggagccagacagagcaggtgcggggaagggaagggccaggccagacccatcccaaacggatgatgggatgatgggacagcagttccttgctcagaagcccttctccccgctgggctgacagactcctcatcttcaggagactcaggaatggagcggtacaggggtctctcttcatccaccgcaacccatccagtgccagctttgagattgcacttgaagaaaggtgcatggaccccctgctgctctgcagattccctttatttaggaaaacaggaataagagcaaaattatcaccaaaaagtgcttcatcaggcgtgctacaggaggaaggagctagaaatagaacaatccatcagcatgagactttgaaaaaaaaaacacatgatcagcttctcatgttccatattcacttattggcgatttggggaaaaggccggaacaagagattgttacgagagtggcagaaacccttttgtagattgacttgtgtttgtgccaagcgggctttccattgaccttcagttaaagaacaaaccatgtgacaaaattgttaccttccacttactgtagcaaataatacctacaagttgaacttctaagatgcgtatatgtacaatttggtgccattatttctcctacgtattagagaaacaaatccatctttgaatctaatggtgtactcatagcaactattactggtttaaatgacaaataattctatcctattgtcactgaagtccttgtaactagcgagtgaatgtgttcctgtgtccttgtatatgtgcgatcgtaaaatttgtgcaatgtaatgtcaaattgacctgtcaatgtcaacctagtagtcaatctaactgcaattagaaattgtcttttgaatatactatatatattttttatgttccaataatgttttatacatcattgtcatcaatatctacagaagctctttgacggtttgaatactatggctcaaggttttcatatgcagctcggatggacatttttcttctaagatggaacttatttttcagatattttctgatgtggagatatgttattaatgaagtggtttgaaaatttgttatattaaaagtgcacaaaaactgagagtgaaaataaaaggtacattttataagcttgcacacattattaacacataagattgaacaaagcatttagattattccaggttatatcatttttttaaagattttccacagctacttgagtgtctaacatacagtaacatctaactcagctaataatttgtaaaatctttatcaatcacattgtggcctcttttaatttttatgttcatggacttttattcctgtgtcttggctgtcataactttttatttctgctatttgctgttgtgtaatatccatggacatgtaatccacttactccatctttacaatccctttttaccaccaataaaaggattttttcttgctgttttgatttcttctattatttgtggaatgaattataccccccttaaatatctttgtttatgccttatgttcagtcatattttaatatgcttccttcatattgaagctgctgatttctcagccaaaaatcatcttagaatctttaaatatccattgcatcatttgttcagaatttaacatccattccaatgttggaggcttgtattacttatatttcatcatattctattgccaagtttagtcagttccacaccaagaatgaactgcatttcctttaaaaattattttaaaacacctttattgaaaagatctcatgactgagatgtggactttggttccatgttttcattgtaagaaagcagagagcggaaaatcaatggctccagtgattaatagatgggtttttagtaattgacaaattcatgagggaaagcatatgatctctttattagtgaatcatgcttattttttactcttaacgccactaatatacatccctaatatcacagggcttgtgcattcagatttttaaaaaattaggatagataaggaaacaacttatattcaagtgtaagatgatatcaggttggtctaagacttttggtgaacacgttcattcaactgtgatcactttattactctgaatgcctactattatcctgattatggggtctcctgaataaatagagtattagtctttatgtcatcattgttcaaaattggagatgtacacatacataccctataccaagagggccgaaactcttcaccttgatgtatgttctgatacaagttgttcagcttcttgtaaatgtgttttccttcggcttgttactgccttttgtcaaataatcttgacaatgctgtataataaatattttctatttatt

SEQ ID NO: 170 - protein, 1194 aa, Homo sapiens
MVGLLLFFFPAIFLEVSLLPRSPGRKVLLAGASSQRSVARMDGDVIIGALFSVHHQPPAEKVPERKCGEIREQYGIQRVEAMFHTLDKINADPVLLPNITLGSEIRDSCWHSSVALEQSIEFIRDSLISIRDEKDGINRCLPDGQSLPPGRTKKPIAGVIGPGSSSVAIQVQNLLQLFDIPQIAYSATSIDLSDKTLYKYFLRVVPSDTLQARAMLDIVKRYNWTYVSAVHTEGNYGESGMDAFKELAAQEGLCIAHSDKIYSNAGEKSFDRLLRKLRERLPKARVVVCFCEGMTVRGLLSAMRRLGVVGEFSLIGSDGWADRDEVIEGYEVEANGGITIKLQSPEVRSFDDYFLKLRLDTNTRNPWFPEFWQHRFQCRLPGHLLENPNFKRICTGNESLEENYVQDSKMGFVINAIYAMAHGLQNMHHALCPGHVGLCDAMKPIDGSKLLDFLIKSSFIGVSGEEVWFDEKGDAPGRYDIMNLQYTEANRYDYVHVGTWHEGVLNIDDYKIQMNKSGVVRSVCSEPCLKGQIKVIRKGEVSCCWICTACKENEYVQDEFTCKACDLGWWPNADLTGCEPIPVRYLEWSNIESIIAIAFSCLGILVTLFVTLIFVLYRDTPVVKSSSRELCYIILAGIFLGYVCPFTLIAKPTTTSCYLQRLLVGLSSAMCYSALVTKTNRIARILAGSKKKICTRKPRFMSAWAQVIIASILISVQLTLVVTLIIMEPPMPILSYPSIKEVYLICNTSNLGVVAPLGYNGLLIMSCTYYAFKTRNVPANFNEAKYIAFTMYTTCIIWLAFVPIYFGSNYKIITTCFAVSLSVTVALGCMFTPKMYIIIAKPERNVRSAFTTSDVVRMHVGDGKLPCRSNTFLNIFRRKKAGAGNANSNGKSVSWSEPGGGQVPKGQHMWHRLSVHVKTNETACNQTAVIKPLTKSYQGSGKSLTFSDTSTKTLYNVEEEEDAQPIRFSPPGSPSMVVHRRVPSAATTPPLPPHLTAEETPLFLAEPALPKGLPPPLQQQQQPPPQQKSLMDQLQGVVSNFSTAIPDFHAVLAGPGGPGNGLRSLYPPPPPPQHLQMLPLQLSTFGEELVSPPADDDDDSERFKLLQEYVYEHEREGNTEEDELEEEEEDLQAASKLTPDDSPALTPPSPFRDSVASGSSVPSSPVSESVLCTPPNVSYASVILRDYKQSSSTL

SEQ ID NO: 171 - DNA, 2621 bp, Homo sapiens
ccatgggatcgctgcttgcgctcctggcactgctgccgctgtggggtgctgtggctgagggcccagccaagaaggtgctgaccctggagggagacttggtgctgggtgggctgttcccagtgcaccagaagggcggcccagcagaggactgtggtcctgtcaatgagcaccgtggcatccagcgcctggaggccatgctttttgcactggaccgcatcaaccgtgacccgcacctgctgcctggcgtgcgcctgggtgcacacatcctcgacagttgctccaaggacacacatgcgctggagcaggcactggactttgtgcgtgcctcactcagccgtggtgctgatggatcacgccacatctgccccgacggctcttatgcgacccatggtgatgctcccactgccatcactggtgttattggcggttcctacagtgatgtctccatccaggtggccaacctcttgaggctatttcagatcccacagattagctacgcctctaccagtgccaagctgagtgacaagtcccgctatgactactttgcccgcacagtgcctcctgacttcttccaagccaaggccatggctgagattctccgcttcttcaactggacctatgtgtccactgaggcctctgagggcgactatggcgagacaggcattgaggcctttgagctagaggctcgtgcccgcaacatctgtgtggccacctcggagaaagtgggccgtgccatgagccgcgcggcctttgagggtgtggtgcgagccctgctgcagaagcccagtgcccgcgtggctgtcctgttcacccgttctgaggatgcccgggagctgcttgctgccagccagcgcctcaatgccagcttcacctgggtggccagtgatggttggggggccctggagagtgtggtggcaggcagtgagggggctgctgagggtgctatcaccatcgagctggcctcctaccccatcagtgactttgcctcctacttccagagcctggacccttggaacaacagccggaacccctggttccgtgaattctgggagcagaggttccgctgcagcttccggcagcgagactgcgcagcccactctctccgggctgtgccctttgaacaggagtccaagatcatgtttgtggtcaatgcagtgtacgccatggcccatgcgctccacaacatgcaccgtgccctctgccccaacaccacccggctctgtgacgcgatgcggccagttaacgggcgccgcctctacaaggactttgtgctcaacgtcaagtttgatgccccctttcgcccagctgacacccacaatgaggtccgctttgaccgctttggtgatggtattggccgctacaacatcttcacctatctgcgtgcaggcagtgggcgctatcgctaccagaaggtgggctactgggcagaaggcttgactctggacaccagcctcatcccatgggcctcaccgtcagccggccccctggccgcctctcgctgcagtgagccctgcctccagaatgaggtgaagagtgtgcagccgggcgaagtctgctgctggctctgcattccgtgccagccctatgagtaccgattggacgaattcacttgcgctgattgtggcctgggctactggcccaatgccagcctgactggctgcttcgaactgccccaggagtacatccgctggggcgatgcctgggctgtgggacctgtcaccatcgcctgcctcggtgccctggccaccctgtttgtgctgggtgtctttgtgcggcacaatgccacaccagtggtcaaggcctcaggtcgggagctctgctacatcctgctgggtggtgtcttcctctgctactgcatgaccttcatcttcattgccaagccatccacggcagtgtgtaccttacggcgtcttggtttgggcactgccttctctgtctgctactcagccctgctcaccaagaccaaccgcattgcacgcatcttcggtggggcccgggagggtgcccagcggccacgcttcatcagtcctgcctcacaggtggccatctgcctggcacttatctcgggccagctgctcatcgtggtcgcctggctggtggtggaggcaccgggcacaggcaaggagacagcccccgaacggcgggaggtggtgacactgcgctgcaaccaccgcgatgcaagtatgttgggctcgctggcctacaatgtgctcctcatcgcgctctgcacgctttatgccttcaatactcgcaagtgccccgaaaacttcaacgaggccaagttcattggcttcaccatgtacaccacctgcatcatctggctggcattgttgcccatcttctatgtcacctccagtgactaccgggtacagaccaccaccatgtgcgtgtcagtcagcctcagcggctccgtggtgcttggctgcctctttgcgcccaagctgcacatcatcctcttccagccgcagaagaacgtggttagccaccgggcacccaccagccgctttggcagtgctgctgccagggccagctccagccttggccaagggtctggctcccagtttgtccccactgtttgcaatggccgtgaggtggtggactcgacaacgtcatcgctttga

SEQ ID NO: 172 - protein, 872 aa, Homo sapiens
MGSLLALLALLPLWGAVAEGPAKKVLTLEGDLVLGGLFPVHQKGGPAEDCGPVNEHRGIQRLEAMLFALDRINRDPHLLPGVRLGAHILDSCSKDTHALEQALDFVRASLSRGADGSRHICPDGSYATHGDAPTAITGVIGGSYSDVSIQVANLLRLFQIPQISYASTSAKLSDKSRYDYFARTVPPDFFQAKAMAEILRFFNWTYVSTEASEGDYGETGIEAFELEARARNICVATSEKVGRAMSRAAFEGVVRALLQKPSARVAVLFTRSEDARELLAASQRLNASFTWVASDGWGALESVVAGSEGAAEGAITIELASYPISDFASYFQSLDPWNNSRNPWFREFWEQRFRCSFRQRDCAAHSLRAVPFEQESKIMFVVNAVYAMAHALHNMHRALCPNTTRLCDAMRPVNGRRLYKDFVLNVKFDAPFRPADTHNEVRFDRFGDGIGRYNIFTYLRAGSGRYRYQKVGYWAEGLTLDTSLIPWASPSAGPLAASRCSEPCLQNEVKSVQPGEVCCWLCIPCQPYEYRLDEFTCADCGLGYWPNASLTGCFELPQEYIRWGDAWAVGPVTIACLGALATLFVLGVFVRHNATPVVKASGRELCYILLGGVFLCYCMTFIFIAKPSTAVCTLRRLGLGTAFSVCYSALLTKTNRIARIFGGAREGAQRPRFISPASQVAICLALISGQLLIVVAWLVVEAPGTGKETAPERREVVTLRCNHRDASMLGSLAYNVLLIALCTLYAFNTRKCPENFNEAKFIGFTMYTTCIIWLALLPIFYVTSSDYRVQTTTMCVSVSLSGSVVLGCLFAPKLHIILFQPQKNVVSHRAPTSRFGSAAARASSSLGQGSGSQFVPTVCNGREVVDSTTSSL

SEQ ID NO: 173 - DNA, 3410 bp, Homo sapiens
cttttgtgtcggatgaggaggaccaaccatgagccagagcccgggtgcaggctcaccgccgccgctgccaccgcggtcagctccagttcctgccaggagttgtcggtgcgaggaattttgtgacaggctctgttagtctgttcctcccttatttgaaggacaggccaaagatccagtttggaaatgagagaggactagcatgacacattggctccaccattgatatctcccagaggtacagaaacaggattcatgaagatgttgacaagactgcaagttcttaccttagctttgttttcaaagggatttttactctctttaggggaccataactttctaaggagagagattaaaatagaaggtgaccttgttttagggggcctgtttcctattaacgaaaaaggcactggaactgaagaatgtgggcgaatcaatgaagaccgagggattcaacgcctggaagccatgttgtttgctattgatgaaatcaacaaagatgattacttgctaccaggagtgaagttgggtgttcacattttggatacatgttcaagggatacctatgcattggagcaatcactggagtttgtcagggcatctttgacaaaagtggatgaagctgagtatatgtgtcctgatggatcctatgccattcaagaaaacatcccacttctcattgcaggggtcattggtggctcttatagcagtgtttccatacaggtggcaaacctgctgcggctcttccagatccctcagatcagctacgcatccaccagcgccaaactcagtgataagtcgcgctatgattactttgccaggaccgtgccccccgacttctaccaggccaaagccatggctgagatcttgcgcttcttcaactggacctacgtgtccacagtagcctccgagggtgattacggggagacagggatcgaggccttcgagcaggaagcccgcctgcgcaacatctgcatcgctacggcggagaaggtgggccgctccaacatccgcaagtcctacgacagcgtgatccgagaactgttgcagaagcccaacgcgcgcgtcgtggtcctcttcatgcgcagcgacgactcgcgggagctcattgcagccgccagccgcgccaatgcctccttcacctgggtggccagcgacggctggggcgcgcaggagagcatcatcaagggcagcgagcatgtggcctacggcgccatcaccctggagctggcctcccagcctgtccgccagttcgaccgctacttccagagcctcaacccctacaacaaccaccgcaacccctggttccgggacttctgggagcaaaagtttcagtgcagcctccagaacaaacgcaaccacaggcgcgtctgcgacaagcacctggccatcgacagcagcaactacgagcaagagtccaagatcatgtttgtggtgaacgcggtgtatgccatggcccacgctttgcacaaaatgcagcgcaccctctgtcccaacactaccaagctttgtgatgctatgaagatcctggatgggaagaagttgtacaaggattacttgctgaaaatcaacttcacggctccattcaacccaaataaagatgcagatagcatagtcaagtttgacacttttggagatggaatggggcgatacaacgtgttcaatttccaaaatgtaggtggaaagtattcctacttgaaagttggtcactgggcagaaaccttatcgctagatgtcaactctatccactggtcccggaactcagtccccacttcccagtgcagcgacccctgtgcccccaatgaaatgaagaatatgcaaccaggggatgtctgctgctggatttgcatcccctgtgaaccctacgaatacctggctgatgagtttacctgtatggattgtgggtctggacagtggcccactgcagacctaactggatgctatgaccttcctgaggactacatcaggtgggaagacgcctgggccattggcccagtcaccattgcctgtctgggttttatgtgtacatgcatggttgtaactgtttttatcaagcacaacaacacacccttggtcaaagcatcgggccgagaactctgctacatcttattgtttggggttggcctgtcatactgcatgacattcttcttcattgccaagccatcaccagtcatctgtgcattgcgccgactcgggctggggagttccttcgctatctgttactcagccctgctgaccaagacaaactgcattgcccgcatcttcgatggggtcaagaatggcgctcagaggccaaaattcatcagccccagttctcaggttttcatctgcctgggtctgatcctggtgcaaattgtgatggtgtctgtgtggctcatcctggaggccccaggcaccaggaggtatacccttgcagagaagcgggaaacagtcatcctaaaatgcaatgtcaaagattccagcatgttgatctctcttacctacgatgtgatcctggtgatcttatgcactgtgtacgccttcaaaacgcggaagtgcccagaaaatttcaacgaagctaagttcataggttttaccatgtacaccacgtgcatcatctggttggccttcctccctatattttatgtgacatcaagtgactacagagtgcagacgacaaccatgtgcatctctgtcagcctgagtggctttgtggtcttgggctgtttgtttgcacccaaggttcacatcatcctgtttcaaccccagaagaatgttgtcacacacagactgcacctcaacaggttcagtgtcagtggaactgggaccacatactctcagtcctctgcaagcacgtatgtgccaacggtgtgcaatgggcgggaagtcctcgactccaccacctcatctctgtgattgtgaattgcagttcagttcttgtgtttttagactgttagacaaaagtgctcacgtgcagctccagaatatggaaacagagcaaaagaacaaccctagtacctttttttagaaacagtacgataaattatttttgaggactgtatatagtgatgtgctagaactttctaggctgagtctagtgcccctattattaacaattcccccagaacatggaaataaccattgtttacagagctgagcattggtgacagggtctgacatggtcagtctactaaaaaacaaaaaaaaaaaacaaaaaaaaaaaaacaaaagaaaaaaataaaaatacggtggcaatattatgtaaccttttttcctatgaagttttttgtaggtccttgttgtaactaatttaggatgagtttctatgttgtatattaaagttacattatgtgtaacagattgattttctcagcacaaaataaaaagcatctgtattaatgtaaagatactgagaataaaaccttcaaggtttt

SEQ ID NO: 174 - protein, 877 aa, Homo sapiens
MLTRLQVLTLALFSKGFLLSLGDHNFLRREIKIEGDLVLGGLFPINEKGTGTEECGRINEDRGIQRLEAMLFAIDEINKDDYLLPGVKLGVHILDTCSRDTYALEQSLEFVRASLTKVDEAEYMCPDGSYAIQENIPLLIAGVIGGSYSSVSIQVANLLRLFQIPQISYASTSAKLSDKSRYDYFARTVPPDFYQAKAMAEILRFFNWTYVSTVASEGDYGETGIEAFEQEARLRNICIATAEKVGRSNIRKSYDSVIRELLQKPNARVVVLFMRSDDSRELIAAASRANASFTWVASDGWGAQESIIKGSEHVAYGAITLELASQPVRQFDRYFQSLNPYNNHRNPWFRDFWEQKFQCSLQNKRNHRRVCDKHLAIDSSNYEQESKIMFVVNAVYAMAHALHKMQRTLCPNTTKLCDAMKILDGKKLYKDYLLKINFTAPFNPNKDADSIVKFDTFGDGMGRYNVFNFQNVGGKYSYLKVGHWAETLSLDVNSIHWSRNSVPTSQCSDPCAPNEMKNMQPGDVCCWICIPCEPYEYLADEFTCMDCGSGQWPTADLTGCYDLPEDYIRWEDAWAIGPVTIACLGFMCTCMVVTVFIKHNNTPLVKASGRELCYILLFGVGLSYCMTFFFIAKPSPVICALRRLGLGSSFAICYSALLTKTNCIARIFDGVKNGAQRPKFISPSSQVFICLGLILVQIVMVSVWLILEAPGTRRYTLAEKRETVILKCNVKDSSMLISLTYDVILVILCTVYAFKTRKCPENFNEAKFIGFTMYTTCIIWLAFLPIFYVTSSDYRVQTTTMCISVSLSGFVVLGCLFAPKVHIILFQPQKNVVTHRLHLNRFSVSGTGTTYSQSSASTYVPTVCNGREVLDSTTSSL

SEQ ID NO: 175 - DNA, 3884 bp, Homo sapiens
ccgagtgacaaggaggtgggagagggtagcagcatgggctacgcggttggctgccctcagtccccctgctgctgaagctgccctgcccatgcccacccaggccgtggggccaggggcctgccagggctaggagtgggcctgccgttcatgggtctctagggatttccgagatgcctgggaagagaggcttgggctggtggtgggcccggctgcccctttgcctgctcctcagcctttacggcccctggatgccttcctccctgggaaagcccaaaggccaccctcacatgaattccatccgcatagatggggacatcacactgggaggcctgttcccggtgcatggccggggctcagagggcaagccctgtggagaacttaagaaggaaaagggcatccaccggctggaggccatgctgttcgccctggatcgcatcaacaacgacccggacctgctgcctaacatcacgctgggcgcccgcattctggacacctgctccagggacacccatgccctcgagcagtcgctgacctttgtgcaggcgctcatcgagaaggatggcacagaggtccgctgtggcagtggcggcccacccatcatcaccaagcctgaacgtgtggtgggtgtcatcggtgcttcagggagctcggtctccatcatggtggccaacatccttcgcctcttcaagataccccagatcagctacgcctccacagcgccagacctgagtgacaacagccgctacgacttcttctcccgcgtggtgccctcggacacgtaccaggcccaggccatggtggacatcgtccgtgccctcaagtggaactatgtgtccacagtggcctcggagggcagctatggtgagagcggtgtggaggccttcatccagaagtcccgtgaggacgggggcgtgtgcatcgcccagtcggtgaagataccacgggagcccaaggcaggcgagttcgacaagatcatccgccgcctcctggagacttcgaacgccagggcagtcatcatctttgccaacgaggatgacatcaggcgtgtgctggaggcagcacgaagggccaaccagacaggccatttcttctggatgggctctgacagctggggctccaagattgcacctgtgctgcacctggaggaggtggctgagggtgctgtcacgatcctccccaagaggatgtccgtacgaggcttcgaccgctacttctccagccgcacgctggacaacaaccggcgcaacatctggtttgccgagttctgggaggacaacttccactgcaagctgagccgccacgccctcaagaagggcagccacgtcaagaagtgcaccaaccgtgagcgaattgggcaggattcagcttatgagcaggaggggaaggtgcagtttgtgatcgatgccgtgtacgccatgggccacgcgctgcacgccatgcaccgtgacctgtgtcccggccgcgtggggctctgcccgcgcatggaccctgtagatggcacccagctgcttaagtacatccgaaacgtcaacttctcaggcatcgcagggaaccctgtgaccttcaatgagaatggagatgcgcctgggcgctatgacatctaccaataccagctgcgcaacgattctgccgagtacaaggtcattggctcctggactgaccacctgcaccttagaatagagcggatgcactggccggggagcgggcagcagctgccccgctccatctgcagcctgccctgccaaccgggtgagcggaagaagacagtgaagggcatgccttgctgctggcactgcgagccttgcacagggtaccagtaccaggtggaccgctacacctgtaagacgtgtccctatgacatgcggcccacagagaaccgcacgggctgccggcccatccccatcatcaagcttgagtggggctcgccctgggccgtgctgcccctcttcctggccgtggtgggcatcgctgccacgttgttcgtggtgatcacctttgtgcgctacaacgacacgcccatcgtcaaggcctcgggccgtgaactgagctacgtgctgctggcaggcatcttcctgtgctatgccaccaccttcctcatgatcgctgagcccgaccttggcacctgctcgctgcgccgaatcttcctgggactagggatgagcatcagctatgcagccctgctcaccaagaccaaccgcatctaccgcatcttcgagcagggcaagcgctcggtcagtgccccacgcttcatcagccccgcctcacagctggccatcaccttcagcctcatctcgctgcagctgctgggcatctgtgtgtggtttgtggtggacccctcccactcggtggtggacttccaggaccagcggacactcgacccccgcttcgccaggggtgtgctcaagtgtgacatctcggacctgtcgctcatctgcctgctgggctacagcatgctgctcatggtcacgtgcaccgtgtatgccatcaagacacgcggcgtgcccgagaccttcaatgaggccaagcccattggcttcaccatgtacaccacttgcatcgtctggctggccttcatccccatcttctttggcacctcgcagtcggccgacaagctgtacatccagacgacgacgctgacggtctcggtgagtctgagcgcctcggtgtccctgggaatgctctacatgcccaaagtctacatcatcctcttccacccggagcagaacgtgcccaagcgcaagcgcagcctcaaagccgtcgttacggcggccaccatgtccaacaagttcacgcagaagggcaacttccggcccaacggagaggccaagtctgagctctgcgagaaccttgaggccccagcgctggccaccaaacagacttacgtcacttacaccaaccatgcaatctagcgagtccatggagctgagcagcaggaggaggagccgtgaccctgtggaaggtgcgtcgggccagggccacacccaagggcccagctgtcttgcctgcccgtgggcacccacggacgtggcttggtgctgaggatagcagagcccccagccatcactgctggcagcctgggcaaaccgggtgagcaacaggaggacgaggggccggggcggtgccaggctaccacaagaacctgcgtcttggaccattgcccctcccggccccaaaccacaggggctcaggtcgtgtgggccccagtgctagatctctccctcccttcgtctctgtctgtgctgttggcgacccctctgtctgtctccagccctgtctttctgttctcttatctctttgtttcaccttttccctctctggcgtccccggctgcttgtactcttggccttttctgtgtctcctttctggctcttgcctccgcctctctctctcatcctctttgtcctcagctcctcctgctttcttgggtcccaccagtgtcacttttctgccgttttctttcctgttctcctctgcttcattctcgtccagccattgctcccctctccctgccacccttccccagttcaccaaaccttacatgttgcaaaagagaaaaaaggaaaaaaaatcaaaacacaaaaaagccaaaacgaaaacaaatctcgagtgtgttgccaagtgctgcgtcctcctggtggcctctgtgtgtgtccctgtggcccgcagcctgcccgcctgccccgcccatctgccgtgtgtcttgcccgcctgccccgcccgtctgccgtctgtcttgcccgcctgcccgcctgcccctcctgccgaccacacggagttcagtgcctgggtgtttggtgatggttattgacgacaatgtgtagcgcatgattgtttttataccaagaacatttctaataaaaataaacacatggttttgcaaaaaa

SEQ ID NO: 176 - protein, 912 aa, Homo sapiens
MPGKRGLGWWWARLPLCLLLSLYGPWMPSSLGKPKGHPHMNSIRIDGDITLGGLFPVHGRGSEGKPCGELKKEKGIHRLEAMLFALDRINNDPDLLPNITLGARILDTCSRDTHALEQSLTFVQALIEKDGTEVRCGSGGPPIITKPERVVGVIGASGSSVSIMVANILRLFKIPQISYASTAPDLSDNSRYDFFSRVVPSDTYQAQAMVDIVRALKWNYVSTVASEGSYGESGVEAFIQKSREDGGVCIAQSVKIPREPKAGEFDKIIRRLLETSNARAVIIFANEDDIRRVLEAARRANQTGHFFWMGSDSWGSKIAPVLHLEEVAEGAVTILPKRMSVRGFDRYFSSRTLDNNRRNIWFAEFWEDNFHCKLSRHALKKGSHVKKCTNRERIGQDSAYEQEGKVQFVIDAVYAMGHALHAMHRDLCPGRVGLCPRMDPVDGTQLLKYIRNVNFSGIAGNPVTFNENGDAPGRYDIYQYQLRNDSAEYKVIGSWTDHLHLRIERMHWPGSGQQLPRSICSLPCQPGERKKTVKGMPCCWHCEPCTGYQYQVDRYTCKTCPYDMRPTENRTGCRPIPIIKLEWGSPWAVLPLFLAVVGIAATLFVVITFVRYNDTPIVKASGRELSYVLLAGIFLCYATTFLMIAEPDLGTCSLRRIFLGLGMSISYAALLTKTNRIYRIFEQGKRSVSAPRFISPASQLAITFSLISLQLLGICVWFVVDPSHSVVDFQDQRTLDPRFARGVLKCDISDLSLICLLGYSMLLMVTCTVYAIKTRGVPETFNEAKPIGFTMYTTCIVWLAFIPIFFGTSQSADKLYIQTTTLTVSVSLSASVSLGMLYMPKVYIILFHPEQNVPKRKRSLKAVVTAATMSNKFTQKGNFRPNGEAKSELCENLEAPALATKQTYVTYTNHAI

SEQ ID NO: 177 - DNA, 4518 bp, Homo sapiens
acaaaatggtcctttagaaaatacatctgaattgctggctaatttcttgatttgcgactcaacgtaggacatcgcttgttcgtagctatcagaaccctcctgaattttccccaccatgctatctttattggcttgaactcctttcctaaaatggtccttctgttgatcctgtcagtcttacttttgaaagaagatgtccgtgggagtgcacagtccagtgagaggagggtggtggctcacatgccgggtgacatcattattggagctctcttttctgttcatcaccagcctactgtggacaaagttcatgagaggaagtgtggggcggtccgtgaacagtatggcattcagagagtggaggccatgctgcataccctggaaaggatcaattcagaccccacactcttgcccaacatcacactgggctgtgagataagggactcctgctggcattcggctgtggccctagagcagagcattgagttcataagagattccctcatttcttcagaagaggaagaaggcttggtacgctgtgtggatggctcctcctcttccttccgctccaagaagcccatagtaggggtcattgggcctggctccagttctgtagccattcaggtccagaatttgctccagcttttcaacatacctcagattgcttactcagcaaccagcatggatctgagtgacaagactctgttcaaatatttcatgagggttgtgccttcagatgctcagcaggcaagggccatggtggacatagtgaagaggtacaactggacctatgtatcagccgtgcacacagaaggcaactatggagaaagtgggatggaagccttcaaagatatgtcagcgaaggaagggatttgcatcgcccactcttacaaaatctacagtaatgcaggggagcagagctttgataagctgctgaagaagctcacaagtcacttgcccaaggcccgggtggtggcctgcttctgtgagggcatgacggtgagaggtctgctgatggccatgaggcgcctgggtctagcgggagaatttctgcttctgggcagtgatggctgggctgacaggtatgatgtgacagatggatatcagcgagaagctgttggtggcatcacaatcaagctccaatctcccgatgtcaagtggtttgatgattattatctgaagctccggccagaaacaaaccaccgaaacccttggtttcaagaattttggcagcatcgttttcagtgccgactggaagggtttccacaggagaacagcaaatacaacaagacttgcaatagttctctgactctgaaaacacatcatgttcaggattccaaaatgggatttgtgatcaacgccatctattcgatggcctatgggctccacaacatgcagatgtccctctgcccaggctatgcaggactctgtgatgccatgaagccaattgatggacggaaacttttggagtccctgatgaaaaccaattttactggggtttctggagatacgatcctattcgatgagaatggagactctccaggaaggtatgaaataatgaatttcaaggaaatgggaaaagattactttgattatatcaacgttggaagttgggacaatggagaattaaaaatggatgatgatgaagtatggtccaagaaaagcaacatcatcagatctgtgtgcagtgaaccatgtgagaaaggccagatcaaggtgatccgaaagggagaagtcagctgttgttggacctgtacaccttgtaaggagaatgagtatgtctttgatgagtacacatgcaaggcatgccaactggggtcttggcccactgatgatctcacaggttgtgacttgatcccagtacagtatcttcgatggggtgaccctgaacccattgcagctgtggtgtttgcctgccttggcctcctggccaccctgtttgttactgtagtcttcatcatttaccgtgatacaccagtagtcaagtcctcaagcagggaactctgctacattatccttgctggcatctgcctgggctacttatgtaccttctgcctcattgcgaagcccaaacagatttactgctaccttcagagaattggcattggtctctccccagccatgagctactcagcccttgtaacaaagaccaaccgtattgcaaggatcctggctggcagcaagaagaagatctgtaccaaaaagcccagattcatgagtgcctgtgcccagctagtgattgctttcattctcatatgcatccagttgggcatcatcgttgccctctttataatggagcctcctgacataatgcatgactacccaagcattcgagaagtctacctgatctgtaacaccaccaacctaggagttgtcactccacttggatacaatggattgttgattttgagctgcaccttctatgcgttcaagaccagaaatgttccagctaacttcaacgaggccaagtatatcgccttcacaatgtacacgacctgcattatatggctagcttttgtgccaatctactttggcagcaactacaaaatcatcaccatgtgtttctcggtcagcctcagtgccacagtggccctaggctgcatgtttgtgccgaaggtgtacatcatcctggccaaaccagagagaaacgtgcgcagcgccttcaccacatctaccgtggtgcgcatgcatgtaggggatggcaagtcatcctccgcagccagcagatccagcagcctagtcaacctgtggaagagaaggggctcctctggggaaaccttaagttccaatggaaaatccgtcacgtgggcccagaatgagaagagcagccgggggcagcacctgtggcagcgcctgtccatccacatcaacaagaaagaaaaccccaaccaaacggccgtcatcaagcccttccccaagagcacggagagccgtggcctgggcgctggcgctggcgcaggcgggagcgctgggggcgtgggggccacgggcggtgcgggctgcgcaggcgccggcccaggcgggcccgagtccccagacgccggccccaaggcgctgtatgatgtggccgaggctgaggagcacttcccggcgcccgcgcggccgcgctcaccgtcgcccatcagcacgctgagccaccgcgcgggctcggccagccgcacggacgacgatgtgccgtcgctgcactcggagcctgtggcgcgcagcagctcctcgcagggctccctcatggagcagatcagcagtgtggtcacccgcttcacggccaacatcagcgagctcaactccatgatgctgtccaccgcggcccccagccccggcgtcggcgccccgctctgctcgtcctacctgatccccaaagagatccagttgcccacgaccatgacgacctttgccgaaatccagcctctgccggccatcgaagtcacgggcggcgcgcagcccgcggcaggggcgcaggcggctggggacgcggcccgggagagccccgcggccggtcccgaggctgcggccgccaagccagacctggaggagctggtggctctcaccccgccgtcccccttcagagactcggtggactcggggagcacaacccccaactcgccagtgtccgagtcggccctctgtatcccgtcgtctcccaaatatgacactcttatcataagagattacactcagagctcctcgtcgttgtgaatgtccctggaaagcacgccggcctgcgcgtgcggagcggagccccccgtgttcacacacacacaatggcaagcatagtcgcctggttacggcccagggggaatatgccaagggaccccttaatggaaacacagatcagtagtgctatctcatgacaaccacaagaaaccgacgacaaatcttttgcgagattttcttctagtggcttagaaacatggcttttaagaaacacggtgatatctttgagggtgacaaggcgtctcttcaaacagttccataccaactgctttgctctagggaagcagtgcgtgtgaaacagcgtaacggagggtgaagagcatagttaataagcaactgtaaaaagttttatttgtttactttaattcttttcccctgtaaaaagttttatttgtttactttaattcttttcccagaaaagagtctttgattcaccaaacatgaatgtacattttctaacaaactcaaaatctgggaccaaaacatcaacttttttctttcttttttctttctttttgttttttctttcctgtaaagaccttgaaaagaccttgaaaagcagtaacttgggtccagtatttacggaggcgttgtgaatgtgtcccatgcataacacactactggatagtgagtcgtgcgctaatgtactacgtagggcttctaccagagattttcctctccaattgggttgtgaaatactcttccaaaagcctgcatcggggattccacctacttatttcagattcacctccattaaccaagaaaaccagtggaagatttcttgactatttcaccatgttgccaatc

SEQ ID NO: 178 - protein, 1180 aa, Homo sapiens
MVLLLILSVLLLKEDVRGSAQSSERRVVAHMPGDIIIGALFSVHHQPTVDKVHERKCGAVREQYGIQRVEAMLHTLERINSDPTLLPNITLGCEIRDSCWHSAVALEQSIEFIRDSLISSEEEEGLVRCVDGSSSSFRSKKPIVGVIGPGSSSVAIQVQNLLQLFNIPQIAYSATSMDLSDKTLFKYFMRVVPSDAQQARAMVDIVKRYNWTYVSAVHTEGNYGESGMEAFKDMSAKEGICIAHSYKIYSNAGEQSFDKLLKKLTSHLPKARVVACFCEGMTVRGLLMAMRRLGLAGEFLLLGSDGWADRYDVTDGYQREAVGGITIKLQSPDVKWFDDYYLKLRPETNHRNPWFQEFWQHRFQCRLEGFPQENSKYNKTCNSSLTLKTHHVQDSKMGFVINAIYSMAYGLHNMQMSLCPGYAGLCDAMKPIDGRKLLESLMKTNFTGVSGDTILFDENGDSPGRYEIMNFKEMGKDYFDYINVGSWDNGELKMDDDEVWSKKSNIIRSVCSEPCEKGQIKVIRKGEVSCCWTCTPCKENEYVFDEYTCKACQLGSWPTDDLTGCDLIPVQYLRWGDPEPIAAVVFACLGLLATLFVTVVFIIYRDTPVVKSSSRELCYIILAGICLGYLCTFCLIAKPKQIYCYLQRIGIGLSPAMSYSALVTKTNRIARILAGSKKKICTKKPRFMSACAQLVIAFILICIQLGIIVALFIMEPPDIMHDYPSIREVYLICNTTNLGVVTPLGYNGLLILSCTFYAFKTRNVPANFNEAKYIAFTMYTTCIIWLAFVPIYFGSNYKIITMCFSVSLSATVALGCMFVPKVYIILAKPERNVRSAFTTSTVVRMHVGDGKSSSAASRSSSLVNLWKRRGSSGETLSSNGKSVTWAQNEKSSRGQHLWQRLSIHINKKENPNQTAVIKPFPKSTESRGLGAGAGAGGSAGGVGATGGAGCAGAGPGGPESPDAGPKALYDVAEAEEHFPAPARPRSPSPISTLSHRAGSASRTDDDVPSLHSEPVARSSSSQGSLMEQISSVVTRFTANISELNSMMLSTAAPSPGVGAPLCSSYLIPKEIQLPTTMTTFAEIQPLPAIEVTGGAQPAAGAQAAGDAARESPAAGPEAAAAKPDLEELVALTPPSPFRDSVDSGSTTPNSPVSESALCIPSSPKYDTLIIRDYTQSSSSL

SEQ ID NO: 179 - DNA, 6122 bp, Homo sapiens
cggaggcccgggcaggccggctgagctaactccccagagccaaagtggaaggcgcgccccgagcgccttctccccaggaccccggtgtccctccccgcgccccgagcccgcgctctccttcccccgccctcagagcgctccccgcccctctgtctccccgcagcccgctagacgagccgatggcgcggccccggagagcccgggagccgctgctcgtggcgctgctgccgctggcgtggctggcgcaggcgggcctggcgcgcgcggcgggctctgtgcgcctggcgggcggcctgacgctgggcggcctgttcccggtgcacgcgcggggcgcggcgggccgggcgtgcgggccgctgaagaaggagcagggcgtgcaccggctggaggccatgctgtacgcgctggaccgcgtcaacgccgaccccgagctgctgcccggcgtgcgcctgggcgcgcggctgctggacacctgctcgcgggacacctacgcgctggagcaggcgctgagcttcgtgcaggcgctgatccgcggccgcggcgacggcgacgaggtgggcgtgcgctgcccgggaggcgtccctccgctgcgccccgcgccccccgagcgcgtcgtggccgtcgtgggcgcctcggccagctccgtctccatcatggtcgccaacgtgctgcgcctgtttgcgataccccagatcagctatgcctccacagccccggagctcagcgactccacacgctatgacttcttctcccgggtggtgccacccgactcctaccaggcgcaggccatggtggacatcgtgagggcactgggatggaactatgtgtccacgctggcctccgagggcaactatggcgaaagtggggttgaggccttcgttcagatctcccgagaggctgggggggtctgtattgcccagtctatcaagattcccagggaaccaaagccaggagagttcagcaaggtgatcaggagactcatggagacgcccaacgcccggggcatcatcatctttgccaatgaggatgacatcaggcgggtcctggaggcagctcgccaggccaacctgaccggccacttcctgtgggtcggctcagacagctggggagccaagacctcacccatcttgagcctggaggacgtggccgttggggccatcaccatcctgcccaaaagggcctccatcgacggatttgaccagtacttcatgactcgatccctggagaacaaccgcaggaacatctggttcgccgagttctgggaagagaattttaactgcaaactgaccagctcaggtacccagtcagatgattccacccgcaaatgcacaggcgaggaacgcatcggccgggactccacctacgagcaggagggcaaggtgcagtttgtgattgatgcggtgtatgccattgcccacgccctccacagcatgcaccaggcgctctgccctgggcacacaggcctgtgcccggcgatggaacccaccgatgggcggatgcttctgcagtacattcgagctgtccgcttcaacggcagcgcaggaacccctgtgatgttcaacgagaacggggatgcgcccgggcggtacgacatcttccagtaccaggcgaccaatggcagtgccagcagtggcgggtaccaggcagtgggccagtgggcagagaccctcagactggatgtggaggccctgcagtggtctggcgacccccacgaggtgccctcgtctctgtgcagcctgccctgcgggccgggggagcggaagaagatggtgaagggcgtcccctgctgttggcactgcgaggcctgtgacgggtaccgcttccaggtggacgagttcacatgcgaggcctgtcctggggacatgaggcccacgcccaaccacacgggctgccgccccacacctgtggtgcgcctgagctggtcctccccctgggcagccccgccgctcctcctggccgtgctgggcatcgtggccactaccacggtggtggccaccttcgtgcggtacaacaacacgcccatcgtccgggcctcgggccgagagctcagctacgtcctcctcaccggcatcttcctcatctacgccatcaccttcctcatggtggctgagcctggggccgcggtctgtgccgcccgcaggctcttcctgggcctgggcacgaccctcagctactctgccctgctcaccaagaccaaccgtatctaccgcatctttgagcagggcaagcgctcggtcacaccccctcccttcatcagccccacctcacagctggtcatcaccttcagcctcacctccctgcaggtggtggggatgatagcatggctgggggcccggcccccacacagcgtgattgactatgaggaacagcggacagtggaccccgagcaggccagaggggtgctcaagtgcgacatgtcggatctgtctctcatcggctgcctgggctacagcctcctgctcatggtcacgtgcacagtgtacgccatcaaggcccgtggcgtgcccgagaccttcaacgaggccaagcccatcggcttcaccatgtacaccacctgcatcatctggctggcattcgtgcccatcttctttggcactgcccagtcagctgaaaagatctacatccagacaaccacgctaaccgtgtccttgagcctgagtgcctcggtgtccctcggcatgctctacgtacccaaaacctacgtcatcctcttccatccagagcagaatgtgcagaagcgaaagcggagcctcaaggccacctccacggtggcagccccacccaagggcgaggatgcagaggcccacaagtagcagggcaggtgggaacgggactgcttgctgcctctcctttcttcctcttgcctcgaggtggaagctgtatagagcccgggtccacggtgaacagtcagtggcagggagtttgccaagaccatgctccgcgtcggtggggctggccttgagaaggaactggacccagctctaccccgattccagcatgtgagcttcatgcttcctcaccacagaccagactcgcttcccatggtgggaaacagccaccgagaaggttctagctctagaaagggactaaacttattctctcatccgaagtccaaagaggatgatgaagccctgggctttgcctggtttgcgggagatttcctcccctcagtcaacccccataacctggggattgggcagtgtggaagaacgtgtagaccccagaatgaaacatggggttggagtggaggaggagctgtctcagcaagaggagacctggggctgtgcatctggatggaggcactcaggcctgggtaggattcctctggcacggagggagagaccctgggtgagacccctgtgagcatgggaagggcctgcagtgggcgcgggagtgagctgaggaactggggtgcgcccccatgagattcccaatgccatgggctttcccccatccccccgggattgggcaaggtcagacttagagtacagctgttttcctcccctctgtgtactcccttaaatcaccccaaccttggccaggcatggtggctcacacctgtaatcccagcactttgggaggccgaggcaggtggatcacctgaggtccggagttcgagaccagcctggccaatgtggtgaaaccctgtctctactaaaaatacaaaaattagccaggtgtgatggtgggtgcctgtaatcccagttacttgggaggctgaggcaggagaatcgcttgaacctgggaggtggaggttgcagtgagctgtgattgtgccactgtactccagcctgggtgacagagcgagactctgtctcaaaaaaacaaaacaaaaaaacaccaaaaaaacccccaaacctgaagaaattcagatacacgtgtgtaatgttagtgatgtgagaacaaggagcaggggtgcatttgtgttgtgttcgggttggggatgggtttaggagctccaggttgggagcagtgacagagagtcatggccgtggtgagggtgaatcccaagtggatggctcaggacgggtatggaaacccttcattcctcataggtactgggaagtccatttgcaagctgagcgccaggcctggggaggaagaggcttgggctgcagatgcacgcacatttgtttttcactgatagtttttacaaaaagcttggtttaagttatggaattttatgtccctgggagtagaatttacatttgttaaattgaccactgtttaagatcagtatacattctctagtctgtgatgtctggagctagttttgagggtgaaccacactttatccaacatacaaactttcccatgcagcttctctggtgcgcagttggttttgaccgtgggactaggtgcttctgcaggttttaagtaattaacttaaaagcttctcctctgagaaacatttctgttgcgctactgactctccttctccacatttgttgtgttcctagggcttctctatagtgcacattaggacgtttcatttgttgctgaatgctttccagaattatttattccatagggtttctctcctgtgcagctctctcatgggtaatggggcgtgttttcttgccaaaggcggttccaccctcgtgattgtatagggctcttctcctgtatgaactctgagatcagtgagctctgatctccaagggaaagttttcctgcatttgctgttttctcatgtctctcccagtgtgaattctctggcttctagctgaaaacttttccacagttttacattcatgtggttttctccactgtgaactctgtgattcagaatcagaagcagttcttagtagaggcatttctacactgattgcactgaggatatctccccagtgtgaagtttctggcatagagtcctggcttcccgcagacgactttcacactctgccatgttcatgcctgtgggcctctctggcaggaactctgatgcaccgcgaggcccatgtactcctgtggctttctcacattcggtctacttgcagggtatctccacagcatgcaccattctgggtacagggggacatcctctgttactgaagatgttgtcatatttagtaccttcacaaggtttctctccttccagaattttctgatgtacacaaataactgacttccacaagagggcttttccacactcggtgtgtgcatacagtttctgcctgtgatcatttctttatgttattattttattttttcgagatagggtcttgctcaatttcttaggctggagtgcagtggcacgatcatagctcactgaagtttcgacctgggctcaagcaatcctcccgcttcagcctcctgagtagctggtgcgcacgaccatacccagctaatgttttattttttgtagagacgaggtctcactatgttgcccaggctggtctcgaacttctgagctcgagcgatcctcctgcctccacctcccaaagtgttcggattacaaacgtgagccatcgcacctagcctctttgatcatttctgtggtgttcagtgggggttgacagctccctaaagattttcctgtttttttgcatgcatgggtttgaattctttgaggtccaatttatttggacccctgaataaagttttgtgggttttcttctatgtgtggaattatataggcattcttccagtgtggtttctcttatgtcgagtgagagctgacctgcaccgaagtttgtcccatttgttgcccttgaattatctgtatgaattatatgttccagtgaaaatggagttctgggttggaggcttattccatgtttacacaattaaaattgcagtgttcctctctgggatgagagctctaaagcagagtaagattacgttctgatgtaagctttaaccacctatttataaggtctcacctgtggtccactgtgttgagacttctacagaagagcttctgtatagtaaccattttcttaggctgtctcacttgtgtgaatcttctgacacatttattatagctttgtcccatttcttatcctttttgctctttagaaatttccctttaatttattacattcattgcttactgtaaagagtccaggtaactgactttaattcaagttacttcctgttcaataaatttaacttttccc

SEQ ID NO: 180 - protein, 877 aa, Homo sapiens
MARPRRAREPLLVALLPLAWLAQAGLARAAGSVRLAGGLTLGGLFPVHARGAAGRACGPLKKEQGVHRLEAMLYALDRVNADPELLPGVRLGARLLDTCSRDTYALEQALSFVQALIRGRGDGDEVGVRCPGGVPPLRPAPPERVVAVVGASASSVSIMVANVLRLFAIPQISYASTAPELSDSTRYDFFSRVVPPDSYQAQAMVDIVRALGWNYVSTLASEGNYGESGVEAFVQISREAGGVCIAQSIKIPREPKPGEFSKVIRRLMETPNARGIIIFANEDDIRRVLEAARQANLTGHFLWVGSDSWGAKTSPILSLEDVAVGAITILPKRASIDGFDQYFMTRSLENNRRNIWFAEFWEENFNCKLTSSGTQSDDSTRKCTGEERIGRDSTYEQEGKVQFVIDAVYAIAHALHSMHQALCPGHTGLCPAMEPTDGRMLLQYIRAVRFNGSAGTPVMFNENGDAPGRYDIFQYQATNGSASSGGYQAVGQWAETLRLDVEALQWSGDPHEVPSSLCSLPCGPGERKKMVKGVPCCWHCEACDGYRFQVDEFTCEACPGDMRPTPNHTGCRPTPVVRLSWSSPWAAPPLLLAVLGIVATTTVVATFVRYNNTPIVRASGRELSYVLLTGIFLIYAITFLMVAEPGAAVCAARRLFLGLGTTLSYSALLTKTNRIYRIFEQGKRSVTPPPFISPTSQLVITFSLTSLQVVGMIAWLGARPPHSVIDYEEQRTVDPEQARGVLKCDMSDLSLIGCLGYSLLLMVTCTVYAIKARGVPETFNEAKPIGFTMYTTCIIWLAFVPIFFGTAQSAEKIYIQTTTLTVSLSLSASVSLGMLYVPKTYVILFHPEQNVQKRKRSLKATSTVAAPPKGEDAEAHK

SEQ ID NO: 181 - DNA, 4312 bp, Homo sapiens
gaattcccaacacccaggtaatttttgtatttttagtagagattgggtttcaccatgttggccaggatggtctccatctcttgacctcgggatcctcctggcttggtctccaaaagtgctgggattacaggcatgagtcaccatatccagccaactgcagtcattcttatggggcaaacacttggctgaacccaggttttctaaagatacaaacccatgggcaacaccaagcattctaatggaataggcacctggctgactccaggcattctaataatagagacacctgggcgaactcagacggtcgcccctccccggattcccccaccctccgtgcctgcaggagcccctgggctttcccggaggagctcgccctgaagggcccggacctcggcgagcccaccaccgttccctccagcgccgccgccgccaccgcagcagccggagcagcatggtccagctgaggaagctgctccgcgtcctgactttgatgaagttcccctgctgcgtgctggaggtgctcctgtgcgcgctggcggcggcggcgcgcggccaggagatgtacgccccgcactcaatccggatcgagggggacgtcaccctcggggggctgttccccgtgcacgccaagggtcccagcggagtgccctgcggcgacatcaagagggaaaacgggatccacaggctggaagcgatgctctacgccctggaccagatcaacagtgatcccaacctactgcccaacgtgacgctgggcgcgcggatcctggacacttgttccagggacacttacgcgctcgaacagtcgcttactttcgtccaggcgctcatccagaaggacacctccgacgtgcgctgcaccaacggcgaaccgccggttttcgtcaagccggagaaagtagttggagtgattggggcttcggggagttcggtctccatcatggtagccaacatcctgaggctcttccagatcccccagattagttatgcatcaacggcacccgagctaagtgatgaccggcgctatgacttcttctctcgcgtggtgccacccgattccttccaagcccaggccatggtagacattgtaaaggccctaggctggaattatgtgtctaccctcgcatcggaaggaagttatggagagaaaggtgtggagtccttcacgcagatttccaaagaggcaggtggactctgcattgcccagtccgtgagaatcccccaggaacgcaaagacaggaccattgactttgatagaattatcaaacagctcctggacacccccaactccagggccgtcgtgatttttgccaacgatgaggatataaagcagatccttgcagcagccaaaagagctgaccaagttggccattttctttgggtgggatcagacagctggggatccaaaataaacccactgcaccagcatgaagatatcgcagaaggggccatcaccattcagcccaagcgagccacggtggaagggtttgatgcctactttacgtcccgtacacttgaaaacaacagaagaaatgtatggtttgccgaatactgggaggaaaacttcaactgcaagttgacgattagtgggtcaaaaaaagaagacacagatcgcaaatgcacaggacaggagagaattggaaaagattccaactatgagcaggagggtaaagtccagttcgtgattgacgcagtctatgctatggctcacgcccttcaccacatgaacaaggatctctgtgctgactaccggggtgtctgcccagagatggagcaagctggaggcaagaagttgctgaagtatatacgcaatgttaatttcaatggtagtgctggcactccagtgatgtttaacaagaacggggatgcacctgggcgttatgacatctttcagtaccagaccacaaacaccagcaacccgggttaccgtctgatcgggcagtggacagacgaacttcagctcaatatagaagacatgcagtggggtaaaggagtccgagagatacccgcctcagtgtgcacactaccatgtaagccaggacagagaaagaagacacagaaaggaactccttgctgttggacctgtgagccttgcgatggttaccagtaccagtttgatgagatgacatgccagcattgcccctatgaccagaggcccaatgaaaatcgaaccggatgccaggatattcccatcatcaaactggagtggcactccccctgggctgtgattcctgtcttcctggcaatgttggggatcattgccaccatctttgtcatggccactttcatccgctacaatgacacgcccattgtccgggcatctgggcgggaactcagctatgttcttttgacgggcatctttctttgctacatcatcactttcctgatgattgccaaaccagatgtggcagtgtgttctttccggcgagttttcttgggcttgggtatgtgcatcagttatgcagccctcttgacgaaaacaaatcggatttatcgcatatttgagcagggcaagaaatcagtaacagctcccagactcataagcccaacatcacaactggcaatcacttccagtttaatatcagttcagcttctaggggtgttcatttggtttggtgttgatccacccaacatcatcatagactacgatgaacacaagacaatgaaccctgagcaagccagaggggttctcaagtgtgacattacagatctccaaatcatttgctccttgggatatagcattcttctcatggtcacatgtactgtgtatgccatcaagactcggggtgtacccgagaattttaacgaagccaagcccattggattcactatgtacacgacatgtatagtatggcttgccttcattccaattttttttggcaccgctcaatcagcggaaaagctctacatacaaactaccacgcttacaatctccatgaacctaagtgcatcagtggcgctggggatgctatacatgccgaaagtgtacatcatcattttccaccctgaactcaatgtccagaaacggaagcgaagcttcaaggcggtagtcacagcagccaccatgtcatcgaggctgtcacacaaacccagtgacagacccaacggtgaggcaaagaccgagctctgtgaaaacgtagacccaaacagccctgctgcaaaaaagaagtatgtcagttataataacctggttatctaacctgttccattccatggaaccatggaggaggaagaccctcagttattttgtcacccaacctggcataggactctttggtcctacccgcttcccatcaccggaggagcttccccggccgggagaccagtgttagaggatccaagcgacctaaacagctgctttatgaaatatccttactttatctgggcttaataagtcactgacatcagcactgccaacttggctgcaattgtggaccttccctaccaaagggagtgttgaaactcaagtcccgccccggctctttagaatggaccactgagagccacaggaccgttttggggctgacctgtcttattacgtatgtacttctaggttgcaaggttttgaaattttctgtacagtttgtgaggacctttgcactttgccatctgatgtcgtacctcggttcactgtttgttttcgaatgccttgttttcatagagccctattctctcagacggtggaatatttggaaaaattttaaaacaattaaaattttaaagcaatcttggcagactaaaacaagtacatctgtacatgactgtataattacgattatagtaccactgcacatcatgttttttttttttaagacaaaaaagatgtttaaagaccaaaaactgtgctgagaaagtatgccccacctatctttggtatatgataggttacataaaaggaaggtattggctgaactgaatagaggtcttgatctttggaatgcatgccagtaatgtattttacagtacatgtttattatgttcaatatttgtatttgtgttctcttttgttatttttaattagggtatatgaatattttgcaataattttaataattattaagctgtttgaaggaaagaatatggatttttcatgtcttgaggttttgttcatgccccctttgactgatcagtgtgataaggactttaggaaaaaaagcatgtatgttttttactgtttgtaataagtactttcgttaatcttgctgcttatgtgccaatttagtggaaaaaaacaacccttgctgaaaaattccctctttccattctctttcaattctgtgatattgtccaagaatgtatcaataaggaattc

SEQ ID NO: 182 - protein, 915 aa, Homo sapiens
MVQLRKLLRVLTLMKFPCCVLEVLLCALAAAARGQEMYAPHSIRIEGDVTLGGLFPVHAKGPSGVPCGDIKRENGIHRLEAMLYALDQINSDPNLLPNVTLGARILDTCSRDTYALEQSLTFVQALIQKDTSDVRCTNGEPPVFVKPEKVVGVIGASGSSVSIMVANILRLFQIPQISYASTAPELSDDRRYDFFSRVVPPDSFQAQAMVDIVKALGWNYVSTLASEGSYGEKGVESFTQISKEAGGLCIAQSVRIPQERKDRTIDFDRIIKQLLDTPNSRAVVIFANDEDIKQILAAAKRADQVGHFLWVGSDSWGSKINPLHQHEDIAEGAITIQPKRATVEGFDAYFTSRTLENNRRNVWFAEYWEENFNCKLTISGSKKEDTDRKCTGQERIGKDSNYEQEGKVQFVIDAVYAMAHALHHMNKDLCADYRGVCPEMEQAGGKKLLKYIRNVNFNGSAGTPVMFNKNGDAPGRYDIFQYQTTNTSNPGYRLIGQWTDELQLNIEDMQWGKGVREIPASVCTLPCKPGQRKKTQKGTPCCWTCEPCDGYQYQFDEMTCQHCPYDQRPNENRTGCQDIPIIKLEWHSPWAVIPVFLAMLGIIATIFVMATFIRYNDTPIVRASGRELSYVLLTGIFLCYIITFLMIAKPDVAVCSFRRVFLGLGMCISYAALLTKTNRIYRIFEQGKKSVTAPRLISPTSQLAITSSLISVQLLGVFIWFGVDPPNIIIDYDEHKTMNPEQARGVLKCDITDLQIICSLGYSILLMVTCTVYAIKTRGVPENFNEAKPIGFTMYTTCIVWLAFIPIFFGTAQSAEKLYIQTTTLTISMNLSASVALGMLYMPKVYIIIFHPELNVQKRKRSFKAVVTAATMSSRLSHKPSDRPNGEAKTELCENVDPNSPAAKKKYVSYNNLVI

SEQ ID NO: 183 - DNA, 3321 bp, Homo sapiens
tgctgtgttgcaagaataaactttgggtcttggattgcaataccacctgtggagaaaatggtatgcgagggaaagcgatcagcctcttgcccttgtttcttcctcttgaccgccaagttctactggatcctcacaatgatgcaaagaactcacagccaggagtatgcccattccatacgggtggatggggacattattttggggggtctcttccctgtccacgcaaagggagagagaggggtgccttgtggggagctgaagaaggaaaaggggattcacagactggaggccatgctttatgcaattgaccagattaacaaggaccctgatctcctttccaacatcactctgggtgtccgcatcctcgacacgtgctctagggacacctatgctttggagcagtctctaacattcgtgcaggcattaatagagaaagatgcttcggatgtgaagtgtgctaatggagatccacccattttcaccaagcccgacaagatttctggcgtcataggtgctgcagcaagctccgtgtccatcatggttgctaacattttaagactttttaagatacctcaaatcagctatgcatccacagccccagagctaagtgataacaccaggtatgactttttctctcgagtggttccgcctgactcctaccaagcccaagccatggtggacatcgtgacagcactgggatggaattatgtttcgacactggcttctgaggggaactatggtgagagcggtgtggaggccttcacccagatctcgagggagattggtggtgtttgcattgctcagtcacagaaaatcccacgtgaaccaagacctggagaatttgaaaaaattatcaaacgcctgctagaaacacctaatgctcgagcagtgattatgtttgccaatgaggatgacatcaggaggatattggaagcagcaaaaaaactaaaccaaagtgggcattttctctggattggctcagatagttggggatccaaaatagcacctgtctatcagcaagaggagattgcagaaggggctgtgacaattttgcccaaacgagcatcaattgatggatttgatcgatactttagaagccgaactcttgccaataatcgaagaaatgtgtggtttgcagaattctgggaggagaattttggctgcaagttaggatcacatgggaaaaggaacagtcatataaagaaatgcacagggctggagcgaattgctcgggattcatcttatgaacaggaaggaaaggtccaatttgtaattgatgctgtatattccatggcttacgccctgcacaatatgcacaaagatctctgccctggatacattggcctttgtccacgaatgagtaccattgatgggaaagagctacttggttatattcgggctgtaaattttaatggcagtgctggcactcctgtcacttttaatgaaaacggagatgctcctggacgttatgatatcttccagtatcaaataaccaacaaaagcacagagtacaaagtcatcggccactggaccaatcagcttcatctaaaagtggaagacatgcagtgggctcatagagaacatactcacccggcgtctgtctgcagcctgccgtgtaagccaggggagaggaagaaaacggtgaaaggggtcccttgctgctggcactgtgaacgctgtgaaggttacaactaccaggtggatgagctgtcctgtgaactttgccctctggatcagagacccaacatgaaccgcacaggctgccagcttatccccatcatcaaattggagtggcattctccctgggctgtggtgcctgtgtttgttgcaatattgggaatcatcgccaccacctttgtgatcgtgacctttgtccgctataatgacacacctatcgtgagggcttcaggacgcgaacttagttacgtgctcctaacggggatttttctctgttattcaatcacgtttttaatgattgcagcaccagatacaatcatatgctccttccgacgggtcttcctaggacttggcatgtgtttcagctatgcagcccttctgaccaaaacaaaccgtatccaccgaatatttgagcaggggaagaaatctgtcacagcgcccaagttcattagtccagcatctcagctggtgatcaccttcagcctcatctccgtccagctccttggagtgtttgtctggtttgttgtggatcccccccacatcatcattgactatggagagcagcggacactagatccagagaaggccaggggagtgctcaagtgtgacatttctgatctctcactcatttgttcacttggatacagtatcctcttgatggtcacttgtactgtttatgccaataaaacgagaggtgtcccagagactttcaatgaagccaaacctattggatttaccatgtataccacctgcatcatttggttagctttcatccccatcttttttggtacagcccagtcagcagaaaagatgtacatccagacaacaacacttactgtctccatgagtttaagtgcttcagtatctctgggcatgctctatatgcccaaggtttatattataatttttcatccagaacagaatgttcaaaaacgcaagaggagcttcaaggctgtggtgacagctgccaccatgcaaagcaaactgatccaaaaaggaaatgacagaccaaatggcgaggtgaaaagtgaactctgtgagagtcttgaaaccaacacttcctctaccaagacaacatatatcagttacagcaatcattcaatctgaaacagggaaatggcacaatctgaagagacgtggtatatgatcttaaatgatgaacatgagaccgcaaaaattcactcctggagatctccgtagactacaatcaatcaaatcaatagtcagtcttgtaaggaacaaaaattagccatgagccaaaagtatcaataaacggggagtgaagaaacccgttttatacaataaaaccaatgagtgtcaagctaaagtattgcttattcatgagcagttaaaacaaatcacaaaaggaaaactaatgttagctcgtgaaaaaaatgctgttgaaataaataatgtctgatgttattcttgtatttttctgtgattgtgagaactcccgttcctgtcccacattgtttaacttgtataagacaatgagtctgtttcttgtaatggctgaccagattgaagccctgggttgtgctaaaaataaatgcaatgattgatgcatgcaattttttatacaaataatttatttctaataataaaggaatgttttgcaaaaaaaaaaaaaaaaaactcgag

SEQ ID NO: 184 - protein, 908 aa, Homo sapiens
MVCEGKRSASCPCFFLLTAKFYWILTMMQRTHSQEYAHSIRVDGDIILGGLFPVHAKGERGVPCGELKKEKGIHRLEAMLYAIDQINKDPDLLSNITLGVRILDTCSRDTYALEQSLTFVQALIEKDASDVKCANGDPPIFTKPDKISGVIGAAASSVSIMVANILRLFKIPQISYASTAPELSDNTRYDFFSRVVPPDSYQAQAMVDIVTALGWNYVSTLASEGNYGESGVEAFTQISREIGGVCIAQSQKIPREPRPGEFEKIIKRLLETPNARAVIMFANEDDIRRILEAAKKLNQSGHFLWIGSDSWGSKIAPVYQQEEIAEGAVTILPKRASIDGFDRYFRSRTLANNRRNVWFAEFWEENFGCKLGSHGKRNSHIKKCTGLERIARDSSYEQEGKVQFVIDAVYSMAYALHNMHKDLCPGYIGLCPRMSTIDGKELLGYIRAVNFNGSAGTPVTFNENGDAPGRYDIFQYQITNKSTEYKVIGHWTNQLHLKVEDMQWAHREHTHPASVCSLPCKPGERKKTVKGVPCCWHCERCEGYNYQVDELSCELCPLDQRPNMNRTGCQLIPIIKLEWHSPWAVVPVFVAILGIIATTFVIVTFVRYNDTPIVRASGRELSYVLLTGIFLCYSITFLMIAAPDTIICSFRRVFLGLGMCFSYAALLTKTNRIHRIFEQGKKSVTAPKFISPASQLVITFSLISVQLLGVFVWFVVDPPHIIIDYGEQRTLDPEKARGVLKCDISDLSLICSLGYSILLMVTCTVYANKTRGVPETFNEAKPIGFTMYTTCIIWLAFIPIFFGTAQSAEKMYIQTTTLTVSMSLSASVSLGMLYMPKVYIIIFHPEQNVQKRKRSFKAVVTAATMQSKLIQKGNDRPNGEVKSELCESLETNTSSTKTTYISYSNHSI

SEQ ID NO: 185 - DNA, 2162 bp, Homo sapiens
  misc_feature (2063)..(2063): unknown nucleotide
  misc_feature (2091)..(2091): unknown nucleotide
ggaattccggctataggcagaggagaatgtcagatgctcagctcggtcccctccgcctgacgctcctctctgtctcagccaggactggtttctgtaagaaacagcaggagctgtggcagcggcgaaaggaagcggctgaggcgcttggaacccgaaaagtctcggtgctcctggctacctcgcacagcggtgcccgcccggccgtcagtaccatggacagcagcgctgcccccacgaacgccagcaattgcactgatgccttggcgtactcaagttgctccccagcacccagccccggttcctgggtcaacttgtcccacttagatggcaacctgtccgacccatgcggtccgaaccgcaccaacctgggcgggagagacagcctgtgccctccgaccggcagtccctccatgatcacggccatcacgatcatggccctctactccatcgtgtgcgtggtggggctcttcggaaacttcctggtcatgtatgtgattgtcagatacaccaagatgaagactgccaccaacatctacattttcaaccttgctctggcagatgccttagccaccagtaccctgcccttccagagtgtgaattacctaatgggaacatggccatttggaaccatcctttgcaagatagtgatctccatagattactataacatgttcaccagcatattcaccctctgcaccatgagtgttgatcgatacattgcagtctgccaccctgtcaaggccttagatttccgtactccccgaaatgccaaaattatcaatgtctgcaactggatcctctcttcagccattggtcttcctgtaatgttcatggctacaacaaaatacaggcaaggttccatagattgtacactaacattctctcatccaacctggtactgggaaaacctcgtgaagatctgtgttttcatcttcgccttcattatgccagtgctcatcattaccgtgtgctatggactgatgatcttgcgcctcaagagtgtccgcatgctctctggctccaaagaaaaggacaggaatcttcgaaggatcaccaggatggtgctggtggtggtggctgtgttcatcgtctgctggactcccattcacatttacgtcatcattaaagccttggttacaatcccagaaactacgttccagactgtttcttggcacttctgcattgctctaggttacacaaacagctgcctcaacccagtcctttatgcatttctggatgaaaacttcaaacgatgcttcagagagttctgtatcccaacctcttccaacattgagcaacaaaactccactcgaattcgtcagaacactagagaccacccctccacggccaatacagtggatagaactaatcatcagctagaaaatctggaagcagaaactgctccgttgccctaacagggtctcatgccattccgaccttcaccaagcttagaagccaccatgtatgtggaagcaggttgcttcaagaatgtgtaggaggctctaattctctaggaaagtgcctacttttaggtcatccaacctctttcctctctggccactctgctctgcacattagagggacagccaaaagtaagtggagcatttggaaggaaaggaatataccacaccgaggagtccagtttgtgcaagacacccagtggaaccaaaacccatcgtggtatgtgaattgaagtcatcataaaaggtgacccttctgtctgtaagattttattttcaagcaaatatttatgacctcaacaaagaagaaccatcttttgttaagttcaccgtagtaacacataaagtaaatgctacctctgatcaaagcaccttgaatggaaggtccgagtctttttagtgtttttgcaagggaatgaatccattattctattttagacttttaacttcaacttaaaattagcatctggctaaggcatcattttcacctccatttcttggttttgtattgtttaaaaaaaataacatctctttcatctagctccataattgcaagggaagagattagcatgaaaggtaatctgaaacacagtcatgtgtcanctgtagaaaggttgattctcatgcactncaaatacttccaaagagtcatcatgggggatttttcattcttaggctttcagtggtttgttcctggaattc

SEQ ID NO: 186 - protein, 400 aa, Homo sapiens
MDSSAAPTNASNCTDALAYSSCSPAPSPGSWVNLSHLDGNLSDPCGPNRTNLGGRDSLCPPTGSPSMITAITIMALYSIVCVVGLFGNFLVMYVIVRYTKMKTATNIYIFNLALADALATSTLPFQSVNYLMGTWPFGTILCKIVISIDYYNMFTSIFTLCTMSVDRYIAVCHPVKALDFRTPRNAKIINVCNWILSSAIGLPVMFMATTKYRQGSIDCTLTFSHPTWYWENLVKICVFIFAFIMPVLIITVCYGLMILRLKSVRMLSGSKEKDRNLRRITRMVLVVVAVFIVCWTPIHIYVIIKALVTIPETTFQTVSWHFCIALGYTNSCLNPVLYAFLDENFKRCFREFCIPTSSNIEQQNSTRIRQNTRDHPSTANTVDRTNHQLENLEAETAPLP

SEQ ID NO: 187 - DNA, 1383 bp, Homo sapiens
atgaacacttcagccccacctgctgtcagccccaacatcaccgtcctggcaccaggaaagggtccctggcaagtggccttcattgggatcaccacgggcctcctgtcgctagccacagtgacaggcaacctgctggtactcatctctttcaaggtcaacacggagctcaagacagtcaataactacttcctgctgagcctggcctgtgctgacctcatcatcggtaccttctccatgaacctctataccacgtacctgctcatgggccactgggctctgggcacgctggcttgtgacctctggctggccctggactatgtggccagcaatgcctccgtcatgaatctgctgctcatcagctttgaccgctacttctccgtgactcggcccctgagctaccgtgccaagcgcacaccccgccgggcagctctgatgatcggcctggcctggctggtttcctttgtgctctgggccccagccatcctcttctggcagtacctggtaggggagcggacgatgctagctgggcagtgctacatccagttcctctcccagcccatcatcacctttggcacagccatggctgccttctacctccctgtcacagtcatgtgcacgctctactggcgcatctaccgggagacagagaaccgagcacgggagctggcagcccttcagggctccgagacgccaggcaaagggggtggcagcagcagcagctcagagaggtctcagccaggggctgagggctcaccagagactcctccaggccgctgctgtcgctgctgccgggcccccaggctgctgcaggcctacagctggaaggaagaagaggaagaggacgaaggctccatggagtccctcacatcctcagagggagaggagcctggctccgaagtggtgatcaagatgccaatggtggaccccgaggcacaggcccccaccaagcagcccccacggagctccccaaatacagtcaagaggccgactaagaaagggcgtgatcgagctggcaagggccagaagccccgtggaaaggagcagctggccaagcggaagaccttctcgctggtcaaggagaagaaggcggctcggaccctgagtgccatcctcctggccttcatcctcacctggacaccgtacaacatcatggtgctggtgtccaccttctgcaaggactgtgttcccgagaccctgtgggagctgggctactggctgtgctacgtcaacagcaccatcaaccccatgtgctacgcactctgcaacaaagccttccgggacacctttcgcctgctgctgctttgccgctgggacaagagacgctggcgcaagatccccaagcgccctggctccgtgcaccgcactccctcccgccaatgctga

SEQ ID NO: 188 - protein, 460 aa, Homo sapiens
MNTSAPPAVSPNITVLAPGKGPWQVAFIGITTGLLSLATVTGNLLVLISFKVNTELKTVNNYFLLSLACADLIIGTFSMNLYTTYLLMGHWALGTLACDLWLALDYVASNASVMNLLLISFDRYFSVTRPLSYRAKRTPRRAALMIGLAWLVSFVLWAPAILFWQYLVGERTMLAGQCYIQFLSQPIITFGTAMAAFYLPVTVMCTLYWRIYRETENRARELAALQGSETPGKGGGSSSSSERSQPGAEGSPETPPGRCCRCCRAPRLLQAYSWKEEEEEDEGSMESLTSSEGEEPGSEVVIKMPMVDPEAQAPTKQPPRSSPNTVKRPTKKGRDRAGKGQKPRGKEQLAKRKTFSLVKEKKAARTLSAILLAFILTWTPYNIMVLVSTFCKDCVPETLWELGYWLCYVNSTINPMCYALCNKAFRDTFRLLLLCRWDKRRWRKIPKRPGSVHRTPSRQC

SEQ ID NO: 189 - DNA, 1401 bp, Homo sapiens
atgaataactcaacaaactcctctaacaatagcctggctcttacaagtccttataagacatttgaagtggtgtttattgtcctggtggctggatccctcagtttggtgaccattatcgggaacatcctagtcatggtttccattaaagtcaaccgccacctccagaccgtcaacaattactttttattcagcttggcctgtgctgaccttatcataggtgttttctccatgaacttgtacaccctctacactgtgattggttactggcctttgggacctgtggtgtgtgacctttggctagccctggactatgtggtcagcaatgcctcagttatgaatctgctcatcatcagctttgacaggtacttctgtgtcacaaaacctctgacctacccagtcaagcggaccacaaaaatggcaggtatgatgattgcagctgcctgggtcctctctttcatcctctgggctccagccattctcttctggcagttcattgtaggggtgagaactgtggaggatggggagtgctacattcagtttttttccaatgctgctgtcacctttggtacggctattgcagccttctatttgccagtgatcatcatgactgtgctatattggcacatatcccgagccagcaagagcaggataaagaaggacaagaaggagcctgttgccaaccaagaccccgtttctccaagtctggtacaaggaaggatagtgaagccaaacaataacaacatgcccagcagtgacgatggcctggagcacaacaaaatccagaatggcaaagcccccagggatcctgtgactgaaaactgtgttcagggagaggagaaggagagctccaatgactccacctcagtcagtgctgttgcctctaatatgagagatgatgaaataacccaggatgaaaacacagtttccacttccctgggccattccaaagatgagaactctaagcaaacatgcatcagaattggcaccaagaccccaaaaagtgactcatgtaccccaactaataccaccgtggaggtagtggggtcttcaggtcagaatggagatgaaaagcagaatattgtagcccgcaagattgtgaagatgactaagcagcctgcaaaaaagaagcctcctccttcccgggaaaagaaagtcaccaggacaatcttggctattctgttggctttcatcatcacttgggccccatacaatgtcatggtgctcattaacaccttttgtgcaccttgcatccccaacactgtgtggacaattggttactggctttgttacatcaacagcactatcaaccctgcctgctatgcactttgcaatgccaccttcaagaagacctttaaacaccttctcatgtgtcattataagaacataggcgctacaaggtaa

SEQ ID NO: 190 - protein, 466 aa, Homo sapiens
MNNSTNSSNNSLALTSPYKTFEVVFIVLVAGSLSLVTIIGNILVMVSIKVNRHLQTVNNYFLFSLACADLIIGVFSMNLYTLYTVIGYWPLGPVVCDLWLALDYVVSNASVMNLLIISFDRYFCVTKPLTYPVKRTTKMAGMMIAAAWVLSFILWAPAILFWQFIVGVRTVEDGECYIQFFSNAAVTFGTAIAAFYLPVIIMTVLYWHISRASKSRIKKDKKEPVANQDPVSPSLVQGRIVKPNNNNMPSSDDGLEHNKIQNGKAPRDPVTENCVQGEEKESSNDSTSVSAVASNMRDDEITQDENTVSTSLGHSKDENSKQTCIRIGTKTPKSDSCTPTNTTVEVVGSSGQNGDEKQNIVARKIVKMTKQPAKKKPPPSREKKVTRTILAILLAFIITWAPYNVMVLINTFCAPCIPNTVWTIGYWLCYINSTINPACYALCNATFKKTFKHLLMCHYKNIGATR

SEQ ID NO: 191 - DNA, 504 bp, Homo sapiens
  misc_feature (222)..(222): Unknown nucleotide
  misc_feature (344)..(344): Unknown nucleotide
  misc_feature (487)..(487): Unknown nucleotide
cctggcagtgccgatgttccgatactggcacagcagcaggtgccggaaggtctttttaaaggtggcgttgcacagagcatagcaggcagggttgatggtgctgttgacgtagcagagccagtagccaatggaccacaccgggtcagggatgcagctctggcagaaggtgttcaccaggaccatgacgttgtgaggcgtcccggtgaggatgaaagctaacanaatggcaaagatcggtcgtggcactttgcgctcccgggcccgcatctgccgcttcttgcgcacctgggtgcgagcgatgctagcgaacttgcgggccacgttggccgcaggcgcatgccagncggcgtgggagggacaatctcagggctggcacacactcatgggctggctggcttcgtcaaattttggatcttggaccatctgggaggcttggttgaaggcccccggctcggacttgcgggcatgaatccaggccttactctanaggatccccccctctcc

SEQ ID NO: 192 - DNA, 1437 bp, Homo sapiens
atggccaacttcacacctgtcaatggcagctcgggcaatcagtccgtgcgcctggtcacgtcatcatcccacaatcgctatgagacggtggaaatggtcttcattgccacagtgacaggctccctgagcctggtgactgtcgtgggcaacatcctggtgatgctgtccatcaaggtcaacaggcagctgcagacagtcaacaactacttcctcttcagcctggcgtgtgctgatctcatcataggcgccttctccatgaacctctacaccgtgtacatcatcaagggctactggcccctgggcgccgtggtctgcgacctgtggctggccctggactacgtggtgagcaacgcctccgtcatgaaccttctcatcatcagctttgaccgctacttctgcgtcaccaagcctctcacctaccctgcccggcgcaccaccaagatggcaggcctcatgattgctgctgcctgggtactgtccttcgtgctctgggcgcctgccatcttgttctggcagtttgtggtgggtaagcggacggtgcccgacaaccactgcttcatccagttcctgtccaacccagcagtgacctttggcacagccattgctgccttctacctgcctgtggtcatcatgacggtgctgtacatccacatctccctggccagtcgcagccgagtccacaagcaccggcccgagggcccgaaggagaagaaagccaagacgctggccttcctcaagagcccactaatgaagcagagcgtcaagaagccccgcccgggaggccgcccgggaggactgcgcaatggcaagctggaggaggcccccccgccagcgctgccaccgccaccgcgccccgtggctgataaggacacttccaatgagtccagctcaggcagtgccacccagaacaccaaggaacgcccagccacagagctgtccaccacagaggccaccactcccgccatgcccgcccctcccctgcagccgcgggccctcaacccagcctccagatggtccaagatccagattgtgacgaagcagacaggcaatgagtgtgtgacagccattgagattgtgcctgccacgccggctggcatgcgccctgcggccaacgtggcccgcaagttcgccagcatcgctcgcaaccaggtgcgcaagaagcggcagatggcggcccgggagcgcaaagtgacacgaacgatctttgccattctgctagccttcatcctcacctggacgccctacaacgtcatggtcctggtgaacaccttctgccagagctgcatccctgacacggtgtggtccattggctactggctctgctacgtcaacagcaccatcaaccctgcctgctatgctctgtgcaacgccacctttaaaaagaccttccggcacctgctgctgtgccagtatcggaacatcggcactgccaggtag

SEQ ID NO: 193 - protein, 478 aa, Homo sapiens
MANFTPVNGSSGNQSVRLVTSSSHNRYETVEMVFIATVTGSLSLVTVVGNILVMLSIKVNRQLQTVNNYFLFSLACADLIIGAFSMNLYTVYIIKGYWPLGAVVCDLWLALDYVVSNASVMNLLIISFDRYFCVTKPLTYPARRTTKMAGLMIAAAWVLSFVLWAPAILFWQFVVGKRTVPDNHCFIQFLSNPAVTFGTAIAAFYLPVVIMTVLYIHISLASRSRVHKHRPEGPKEKKAKTLAFLKSPLMKQSVKKPRPGGRPGGLRNGKLEEAPPPALPPPPRPVADKDTSNESSSGSATQNTKERPATELSTTEATTPAMPAPPLQPRALNPASRWSKIQIVTKQTGNECVTAIEIVPATPAGMRPAANVARKFASIARNQVRKKRQMAARERKVTRTIFAILLAFILTWTPYNVMVLVNTFCQSCIPDTVWSIGYWLCYVNSTINPACYALCNATFKKTFRHLLLCQYRNIGTAR

SEQ ID NO: 194 - DNA, 1599 bp, Homo sapiens
atggaaggggattcttaccacaatgcaaccaccgtcaatggcaccccagtaaatcaccagcctttggaacgccacaggttgtgggaagtcatcaccattgcagctgtgactgctgtggtaagcctgatcaccattgtgggcaatgtcttggtcatgatctccttcaaagtcaacagccagctcaagacagttaacaactattacctgctcagcttagcctgtgcagatctcatcattggaatcttctccatgaacctctacaccacctacatcctcatgggacgctgggctctcgggagtctggcttgtgacctttggcttgcactggactacgtggccagcaacgcttctgtcatgaaccttctggtgatcagttttgaccgttacttttccatcacaagacccttgacatatcgggccaagcgtactccgaaaagggctggcatcatgattggcttggcctggctgatctccttcatcctctgggccccagcaatcctctgctggcagtacttggttgggaagcggacagttccactggatgagtgccagatccagtttctctctgagcccaccatcacttttggcactgccattgctgccttctacatccctgtttctgtcatgaccatcctctactgtcgaatctaccgggaaacagagaagcgaaccaaggacctggctgacctccagggttctgactctgtgaccaaagctgagaagagaaagccagctcatagggctctgttcagatcctgcttgcgctgtcctcgacccaccctggcccagcgggaaaggaaccaggcctcctggtcatcctcccgcaggagcacctccaccactgggaagccatcccaagccactggcccaagcgccaattgggccaaagctgagcagctcaccacctgtagcagctacccttcctcagaggatgaggacaagcccgccactgaccctgtcctccaagtggtctacaagagtcagggtaaggaaagcccaggggaagaattcagtgctgaagagactgaggaaacttttgtgaaagctgaaactgaaaaaagtgactatgacaccccaaactaccttctgtctccagcagctgctcatagacccaagagtcagaaatgtgtggcctataagttccgattggtggtaaaagctgacgggaaccaggagaccaacaatggctgtcacaaggtgaaaatcatgccctgccccttcccagtggccaaggaaccttcaacgaaaggcctcaatcccaaccccagccatcaaatgaccaaacgaaagagagtggtcctagtcaaagagaggaaagcagcccagacactgagtgccattctcctggccttcatcatcacatggaccccgtataacatcatggtcctggtttctaccttctgtgacaagtgtgtcccagtcaccctgtggcacttgggctattggttgtgctatgtcaatagcactgtcaaccccatctgctatgccctctgcaacagaaccttcaggaagacctttaagatgctgcttctctgccgatggaaaaagaaaaaagtggaagagaagttgtactggcaggggaacagcaagctaccctga

SEQ ID NO: 195 - protein, 532 aa, Homo sapiens
MEGDSYHNATTVNGTPVNHQPLERHRLWEVITIAAVTAVVSLITIVGNVLVMISFKVNSQLKTVNNYYLLSLACADLIIGIFSMNLYTTYILMGRWALGSLACDLWLALDYVASNASVMNLLVISFDRYFSITRPLTYRAKRTPKRAGIMIGLAWLISFILWAPAILCWQYLVGKRTVPLDECQIQFLSEPTITFGTAIAAFYIPVSVMTILYCRIYRETEKRTKDLADLQGSDSVTKAEKRKPAHRALFRSCLRCPRPTLAQRERNQASWSSSRRSTSTTGKPSQATGPSANWAKAEQLTTCSSYPSSEDEDKPATDPVLQVVYKSQGKESPGEEFSAEETEETFVKAETEKSDYDTPNYLLSPAAAHRPKSQKCVAYKFRLVVKADGNQETNNGCHKVKIMPCPFPVAKEPSTKGLNPNPSHQMTKRKRVVLVKERKAAQTLSAILLAFIITWTPYNIMVLVSTFCDKCVPVTLWHLGYWLCYVNSTVNPICYALCNRTFRKTFKMLLLCRWKKKKVEEKLYWQGNSKLP

SEQ ID NO: 196 - DNA, 1755 bp, Homo sapiens
ctattgcagtatctttcagcttccagtcttatctgaagaccccggcaccaaagtgaccaggaggcagagaagaacttcagaggagtctcgtcttgggctgcccgtgggtgagtgggagggtccgggactgcagaccggtggcgatggccactctcccagcagcagaaacctggatagacgggggtggaggcgtgggtgcagacgccgtgaacctgaccgcctcgctagctgccggggcggccacgggggcagttgagactgggtggctgcaactgctggaccaagctggcaacctctcctcctccccttccgcgctgggactgcctgtggcttcccccgcgccctcccagccctgggccaacctcaccaaccagttcgtgcagccgtcctggcgcatcgcgctctggtccctggcgtatggtgtggtggtggcagtggcagttttgggaaatctcatcgtcatctggatcatcctggcccacaagcgcatgaggactgtcaccaactacttccttgtgaacctggctttctccgacgcctccatggccgccttcaacacgttggtcaatttcatctacgcgcttcatagcgagtggtactttggcgccaactactgccgcttccagaacttctttcctatcacagctgtgttcgccagcatctactccatgacggccattgcggtggacaggtatatggctattattgatcccttgaaacccagactgtctgctacagcaaccaagattgtcattggaagtatttggattctagcatttctacttgccttccctcagtgtctttattccaaaaccaaagtcatgccaggccgtactctctgctttgtgcaatggccagaaggtcccaaacaacatttcacttaccatattatcgtcattatactggtgtactgtttcccattgctcatcatgggtattacatacaccattgttggaattactctctggggaggagaaatcccaggagatacctgtgacaagtatcatgagcagctaaaggccaaaagaaaggttgtcaaaatgatgattattgttgtcatgacatttgctatctgctggctgccctatcatatttacttcattctcactgcaatctatcaacaactaaatagatggaaatacatccagcaggtctacctggctagcttttggctggcaatgagctcaaccatgtacaatcccatcatctactgctgtctgaataaaagatttcgagctggcttcaagagagcatttcgctggtgtcctttcatcaaagtttccagctatgatgagctagagctcaagaccaccaggtttcatccaaaccggcaaagcagtatgtacaccgtgaccagaatggagtccatgacagtcgtgtttgaccccaacgatgcagacaccaccaggtccagtcggaagaaaagagcaacgccaagagacccaagtttcaatggctgctctcgcaggaattccaaatctgcctccgccacttcaagtttcataagctcaccctatacctctgtggatgaatattcttaattccatttcctgaggtaaaagattagtgtgagaccatcatggtgccagtctaggaccccattctcctatttatcagtcctgtcctatataccctctagaaacagaaagcaatttttaggcagctatggtcaaattgagaaaggtagtgtataaatgtgacaaagacactaataacatgttagcctccacccaaaataaaatgggctttaaattt

SEQ ID NO: 197 - protein, 465 aa, Homo sapiens
MATLPAAETWIDGGGGVGADAVNLTASLAAGAATGAVETGWLQLLDQAGNLSSSPSALGLPVASPAPSQPWANLTNQFVQPSWRIALWSLAYGVVVAVAVLGNLIVIWIILAHKRMRTVTNYFLVNLAFSDASMAAFNTLVNFIYALHSEWYFGANYCRFQNFFPITAVFASIYSMTAIAVDRYMAIIDPLKPRLSATATKIVIGSIWILAFLLAFPQCLYSKTKVMPGRTLCFVQWPEGPKQHFTYHIIVIILVYCFPLLIMGITYTIVGITLWGGEIPGDTCDKYHEQLKAKRKVVKMMIIVVMTFAICWLPYHIYFILTAIYQQLNRWKYIQQVYLASFWLAMSSTMYNPIIYCCLNKRFRAGFKRAFRWCPFIKVSSYDELELKTTRFHPNRQSSMYTVTRMESMTVVFDPNDADTTRSSRKKRATPRDPSFNGCSRRNSKSASATSSFISSPYTSVDEYS

SEQ ID NO: 198 - DNA, 1352 bp, Homo sapiens
gtgctgtgaggcttgcccgcggacagtaaacttgcaggggcgagagggagggacatcgattaaacctaaatcgtgggcgttcagtcctcagggcaccgagcgcgtgaaaactccagcggactctgctggaaaggagatcatgccctctaagtctctttccaacctctcggtgaccaccggcgcgaatgagagcggttccgttcccgaggggtgggaaagggatttcctgccggcctcggacgggaccaccacggagttggtgatccgctgtgtgatcccgtccctctacctgctcatcatcaccgtgggcttgctgggcaacatcatgctggtgaagatcttcatcaccaacagcgccatgaggagcgtccccaacatcttcatctctaacctggcggccggggacttgctgctgctgctcacctgcgtcccggtggacgcctcgcgctacttcttcgacgagtggatgtttggcaaggtgggctgcaaactgatccctgtcatccagctcacttccgtgggggtttccgtgttcactctcactgccctcagcgccgacaggtacagagccatcgttaaccccatggacatgcagacgtcaggggcattgctgcggacctgtgtgaaggccatgggtatctgggtggtctccgtgttgctggcagttcccgaagcggtgttttcagaagtggctcgcatcagtagcttggataatagcagcttcacagcatgtatcccataccctcaaacagatgaattacatccaaagattcattcagtgctcattttcttggtctatttcctcataccacttgctattattagcatttattattatcatattgcaaagaccttaattaaaagcgcacacaatcttcctggagaatacaatgaacataccaaaaaacagatggaaacacggaaacgcctggctaaaattgtgcttgtctttgtgggctgtttcatcttctgttggtttccaaaccacatcctttacatgtatcggtctttcaactataatgagattgatccatctctaggccacatgattgtcaccttagttgcccgggttctcagttttggcaattcttgtgtcaacccatttgctctttacctactcagtgaaagcttcaggaggcatttcaacagccaactctgctgtgggaggaagtcctatcaagagagaggaaccagctacctactcagctcttcagcggtgcgtatgacatctctgaaaagcaatgctaagaacatggtgaccaattctgttttactaaatgggcacagcatgaagcaggaaatggcaatgtgattttggccattcaactcactacctggagagaacttagtaa

SEQ ID NO: 199 - protein, 390 aa, Homo sapiens
MPSKSLSNLSVTTGANESGSVPEGWERDFLPASDGTTTELVIRCVIPSLYLLIITVGLLGNIMLVKIFITNSAMRSVPNIFISNLAAGDLLLLLTCVPVDASRYFFDEWMFGKVGCKLIPVIQLTSVGVSVFTLTALSADRYRAIVNPMDMQTSGALLRTCVKAMGIWVVSVLLAVPEAVFSEVARISSLDNSSFTACIPYPQTDELHPKIHSVLIFLVYFLIPLAIISIYYYHIAKTLIKSAHNLPGEYNEHTKKQMETRKRLAKIVLVFVGCFIFCWFPNHILYMYRSFNYNEIDPSLGHMIVTLVARVLSFGNSCVNPFALYLLSESFRRHFNSQLCCGRKSYQERGTSYLLSSSAVRMTSLKSNAKNMVTNSVLLNGHSMKQEMAM

SEQ ID NO: 200 - DNA, 4390 bp, Homo sapiens
tatcctatccctatcctagcttttaacctgagccagagctcactacacaggttcctggctatcgagtctgaatctgcactactcaacttataaactgtctgcagacacctgttagggaaattgctgatcatgggcggcaggatctgaactcgctttaccttcttgtttggagcacagggaccgcccagctagaggagcaccagcgcactgcgccccagccctgggcgagggtgcggaggatttgttctcggtgcaatcctgctggcgcttttccggggttctgcgcggatccagctccccatctctgctcctacacacacaaaagaaaacaactctcgattggaagttgtggaattttctcagcccctacgaggcgcggggattctccagccccggccctcctcccgccagcctgaggtctccttcgctcgcctgccttgctagggaccgcagtccctcagccgcagctgggtctgtccgccccgcctttgccctcgccttttcccggggcggatttggtgaagtcggcctcaagtccaggaggtctgtcttcgccgggccagctctcgcggaactggggggtagagagcaaagggagagattcgtggaagggaagggaggtaggggtggcgcaaacgcccagagtatcaaacttgggggtggcacagtaggtgacagcagcagctgcaggtggtggctggggacccgcgagggggcgcccctctgggtagggtctggctgagcgggcttgcaagcccgggaggcggctgagagaccctggacactgttcctgctccctcgccaccaaaacttctcctccagtcccctcccctgcaggaccatcgcccgcagcctctgcacctgttttcttgtgtttaagggtggggtttgcccccctccccacgctcccatctctgatcctcccaccttcacccgcccaccccgcgagtgagtgcggtgcccaggcgcgcttggcctgagaggtcggcagcagacccggcagcgccaaccgcccagccgctctgactgctccggctgcccgcccgcgcggcgcgggctgtcctggaccctaggaggggacggaaccggacttgcctttgggcaccttccagggccctctccaggtcggctggctaatcatcggacagacggactgcacacatcttgtttccgcgtctccgcaaaaacgcgaggtccaggtcagttgtagactcttgtgctggttgcaggccaagtggacctgtactgaaaatgggtccaataggtgcagaggctgatgagaaccagacagtggaagaaatgaaggtggaacaatacgggccacaaacaactcctagaggtgaactggtccctgaccctgagccagagcttatagatagtaccaagctgattgaggtacaagttgttctcatattggcctactgctccatcatcttgcttggggtaattggcaactccttggtgatccatgtggtgatcaaattcaagagcatgcgcacagtaaccaactttttcattgccaatctggctgtggcagatcttttggtgaacactctgtgtctaccgttcactcttacctataccttaatgggggagtggaaaatgggtcctgtcctgtgccacctggtgccctatgcccagggcctggcagtacaagtatccacaatcaccttgacagtaattgccctggaccggcacaggtgcatcgtctaccacctagagagcaagatctccaagcgaatcagcttcctgattattggcttggcctggggcatcagtgccctgctggcaagtcccctggccatcttccgggagtattcgctgattgagatcatcccggactttgagattgtggcctgtactgaaaagtggcctggcgaggagaagagcatctatggcactgtctatagtctttcttccttgttgatcttgtatgttttgcctctgggcattatatcattttcctacactcgcatttggagtaaattgaagaaccatgtcagtcctggagctgcaaatgaccactaccatcagcgaaggcaaaaaaccaccaaaatgctggtgtgtgtggtggtggtgtttgcggtcagctggctgcctctccatgccttccagcttgccgttgacattgacagccaggtcctggacctgaaggagtacaaactcatcttcacagtgttccacatcatcgccatgtgctccacttttgccaatccccttctctatggctggatgaacagcaactacagaaaggctttcctctcggccttccgctgtgagcagcggttggatgccattcactctgaggtgtccgtgacattcaaggctaaaaagaacctggaggtcagaaagaacagtggccccaatgactctttcacagaggctaccaatgtctaaggaagctgtggtgtgaaaatgtatggatgaattctgaccagagctatgaatctggttgatggcggctcacaagtgaaaactgatttcccattttaaagaagaagtggatctaaatggaagcatctgctgtttaattcctggaaaactggctgggcagagcctgtgtgaaaatactggaattcaaagataaggcaacaaaatggtttacttaacagttggttgggtagtaggttgcattatgagtaaaagcagagagaagtacttttgattattttcctggagtgaagaaaacttgaacaagaaattggtattatcaaagcattgctgagagacggtgggaaaataagttgactttcaaatcacgttaggacctggattgaggaggtgtgcagttcgctgctccctgcttggcttatgaaaacaccactgaacagaaatttctccagggagccacaggctctccttcatcgcattttgatttttttgttcattctctagacaaaatccatcagggaatgctgcaggaaacgattgccaactatacgaatggcttcgaggagataaactgaaatttgctatataattaatattttggcagatgataggggaactcctcaacactcagtgggccaattgttcttaaaaccaattgcacgtttggtgaaagtttcttcaactctgaatcaaaagctgaaattctcagaattacaggaaatgcaaaccatcatttaatttctaatttcaagttacatccgctttatggagatactatttagataacaagaatacaacttgatacttttattgttatacctttttgaacatgtatgatttctgttgttatttacctttttaaacagataaatatttttttttcattttagagtagcggaatctaatcttaatctaatcttttaggagtatatttcagagaaattccaagcacaccagtatgaccatccttatttcagaaatgacaatgcatagaggaaaagtaatatgtgcaaagcctccgaagaggatggttaagtaaagacttaggttaccagtatcaggctttcgtttttgtatgtaggtagctctactgcctcctcttaaaaccaacaaaggaaagagagactggctgcaaacttttagaaggaatggcttcgaatagggttcctgggaggaatcccgaggaaatagacgctgctgctctgctgattgtctccactatcctgttttgctcctacccactaatccagcctgggaggctctgggcattagcggaaggcttcaccacaaggagacaggagcgagtattccataggcatgcgctcctagtggcacgagtggcttgggtcaggatcaaagagtgaaggattcggaagtcagctatctggagagagagagagattgtgttttattcgtgtcccatagctttcctatcctatccctatcctagcttttaacctgagccagagctcactacacaggttcctggctatcgagtctgaatctgcactactcaacttataaactgtctgcagacacctgttagggaaattgctgatcatgggcggcaggatctgaactcgctttaccttcttgtttggagcacagggaccgcccagctagaggagcaccagcgcactgcgccccagccctgggcgagggtgcggaggatttgttctcggtgcaatcctgctggcgcttttccggggttctgcgcggatccagctccccatctctgctcctacacacacaaaagaaaacaactctcgattggaagttgtggaattttctcagcccctacgaggcgcggggattctccagccccggccctcctcccgccagcctgaggtctccttcgctcgcctgccttgctagggaccgcagtccctcagccgcagctgggtctgtccgccccgcctttgccctcgccttttcccggggcggatttggtgaagtcggcctcaagtccaggaggtctgtcttcgccgggccagctctc

SEQ ID NO: 201 - protein, 381 aa, Homo sapiens
MGPIGAEADENQTVEEMKVEQYGPQTTPRGELVPDPEPELIDSTKLIEVQVVLILAYCSIILLGVIGNSLVIHVVIKFKSMRTVTNFFIANLAVADLLVNTLCLPFTLTYTLMGEWKMGPVLCHLVPYAQGLAVQVSTITLTVIALDRHRCIVYHLESKISKRISFLIIGLAWGISALLASPLAIFREYSLIEIIPDFEIVACTEKWPGEEKSIYGTVYSLSSLLILYVLPLGIISFSYTRIWSKLKNHVSPGAANDHYHQRRQKTTKMLVCVVVVFAVSWLPLHAFQLAVDIDSQVLDLKEYKLIFTVFHIIAMCSTFANPLLYGWMNSNYRKAFLSAFRCEQRLDAIHSEVSVTFKAKKNLEVRKNSGPNDSFTEATNV

SEQ ID NO: 202 - DNA, 1128 bp, Homo sapiens
atgaacacctctcacctcctggccttgctgctcccaaaatctccacaaggtgaaaacagaagcaaacccctgggcaccccatacaacttctctgaacattgccaggattccgtggacgtgatggtcttcatcgtcacttcctacagcattgagactgtcgtgggggtcctgggtaacctctgcctgatgtgtgtgactgtgaggcagaaggagaaagccaacgtgaccaacctgcttatcgccaacctggccttctctgacttcctcatgtgcctcctctgccagccgctgaccgccgtctacaccatcatggactactggatctttggagagaccctctgcaagatgtcggccttcatccagtgcatgtcggtgacggtctccatcctctcgctcgtcctcgtggccctggagaggcatcagctcatcatcaacccaacaggctggaagcccagcatctcacaggcctacctggggattgtgctcatctgggtcattgcctgtgtcctctccctgcccttcctggccaacagcatcctggagaatgtcttccacaagaaccactccaaggctctggagttcctggcagataaggtggtctgtaccgagtcctggccactggctcaccaccgcaccatctacaccaccttcctgctcctcttccagtactgcctcccactgggcttcatcctggtctgttatgcacgcatctaccggcgcctgcagaggcaggggcgcgtgtttcacaagggcacctacagcttgcgagctgggcacatgaagcaggtcaatgtggtgctggtggtgatggtggtggcctttgccgtgctctggctgcctctgcatgtgttcaacagcctggaagactggcaccatgaggccatccccatctgccacgggaacctcatcttcttagtgtgccacttgcttgccatggcctccacctgcgtcaacccattcatctatggctttctcaacaccaacttcaagaaggagatcaaggccctggtgctgacttgccagcagagcgcccccctggaggagtcggagcatctgcccctgtccacagtacatacggaagtctccaaagggtccctgaggctaagtggcaggtccaatcccatttaa

SEQ ID NO: 203 - protein, 375 aa, Homo sapiens
MNTSHLLALLLPKSPQGENRSKPLGTPYNFSEHCQDSVDVMVFIVTSYSIETVVGVLGNLCLMCVTVRQKEKANVTNLLIANLAFSDFLMCLLCQPLTAVYTIMDYWIFGETLCKMSAFIQCMSVTVSILSLVLVALERHQLIINPTGWKPSISQAYLGIVLIWVIACVLSLPFLANSILENVFHKNHSKALEFLADKVVCTESWPLAHHRTIYTTFLLLFQYCLPLGFILVCYARIYRRLQRQGRVFHKGTYSLRAGHMKQVNVVLVVMVVAFAVLWLPLHVFNSLEDWHHEAIPICHGNLIFLVCHLLAMASTCVNPFIYGFLNTNFKKEIKALVLTCQQSAPLEESEHLPLSTVHTEVSKGSLRLSGRSNPI

SEQ ID NO: 204 - DNA, 1423 bp, Homo sapiens
gaaaggctatcggtaacaactgacctgccacaaagttagaagaaaggattgattcaagaaagactataatatggatttagagctcgacgagtattataacaagacacttgccacagagaataatactgctgccactcggaattctgatttcccagtctgggatgactataaaagcagtgtagatgacttacagtattttctgattgggctctatacatttgtaagtcttcttggctttatggggaatctacttattttaatggctctcatgaaaaagcgtaatcagaagactacggtaaacttcctcataggcaatctggccttttctgatatcttggttgtgctgttttgctcacctttcacactgacgtctgtcttgctggatcagtggatgtttggcaaagtcatgtgccatattatgccttttcttcaatgtgtgtcagttttggtttcaactttaattttaatatcaattgccattgtcaggtatcatatgataaaacatcccatatctaataatttaacagcaaaccatggctactttctgatagctactgtctggacactaggttttgccatctgttctccccttccagtgtttcacagtcttgtggaacttcaagaaacatttggttcagcattgctgagcagcaggtatttatgtgttgagtcatggccatctgattcatacagaattgcctttactatctctttattgctagttcagtatattctgcccttagtttgtcttactgtaagtcatacaagtgtctgcagaagtataagctgtggattgtccaacaaagaaaacagacttgaagaaaatgagatgatcaacttaactcttcatccatccaaaaagagtgggcctcaggtgaaactctctggcagccataaatggagttattcattcatcaaaaaacacagaagaagatatagcaagaagacagcatgtgtgttacctgctccagaaagaccttctcaagagaaccactccagaatacttccagaaaactttggctctgtaagaagtcagctctcttcatccagtaagttcataccaggggtccccacttgctttgagataaaacctgaagaaaattcagatgttcatgaattgagagtaaaacgttctgttacaagaataaaaaagagatctcgaagtgttttctacagactgaccatactgatattagtatttgctgttagttggatgccactacaccttttccatgtggtaactgattttaatgacaatcttatttcaaataggcatttcaagttggtgtattgcatttgtcatttgttgggcatgatgtcctgttgtcttaatccaattctatatgggtttcttaataatgggattaaagctgatttagtgtcccttatacactgtcttcatatgtaataattctcactgttt

SEQ ID NO: 205 - protein, 445 aa, Homo sapiens
MDLELDEYYNKTLATENNTAATRNSDFPVWDDYKSSVDDLQYFLIGLYTFVSLLGFMGNLLILMALMKKRNQKTTVNFLIGNLAFSDILVVLFCSPFTLTSVLLDQWMFGKVMCHIMPFLQCVSVLVSTLILISIAIVRYHMIKHPISNNLTANHGYFLIATVWTLGFAICSPLPVFHSLVELQETFGSALLSSRYLCVESWPSDSYRIAFTISLLLVQYILPLVCLTVSHTSVCRSISCGLSNKENRLEENEMINLTLHPSKKSGPQVKLSGSHKWSYSFIKKHRRRYSKKTACVLPAPERPSQENHSRILPENFGSVRSQLSSSSKFIPGVPTCFEIKPEENSDVHELRVKRSVTRIKKRSRSVFYRLTILILVFAVSWMPLHLFHVVTDFNDNLISNRHFKLVYCICHLLGMMSCCLNPILYGFLNNGIKADLVSLIHCLHM

SEQ ID NO: 206 - DNA, 4131 bp, Homo sapiens
tcaagctcgccccgcgcagcccgagccgggctgggcgctgtcctcgggggcctggggaaccgcgcggtttggagatcggaggcacctggaacccgtggcaagcgccgagccgggagacagcccgaggaaccacgggttctggagctaggagccggaagctgggagtccggaggagagcggagcccggagcccggagcccggggcggcgcgtctgggtctggcgcttcccgactggacggcgcgcccgctggtcttcgccacgcgccctcccctgggctcgcgttcatcggtccccgcctgagacgcgcccactcctgcccggacttccagccccggaggcgccggacagagccgcggactccagcgcccaccatgcgcctcaacagctccgcgccgggaaccccgggcacgccggccgccgaccccttccagcgggcgcaggccggactggaggaggcgctgctggccccgggcttcggcaacgcttcgggcaacgcgtcggagcgcgtcctggcggcacccagcagcgagctggacgtgaacaccgacatctactccaaagtgctggtgaccgccgtgtacctggcgctcttcgtggtgggcacggtgggcaacacggtgacggcgttcacgctggcgcggaagaagtcgctgcagagcctgcagagcacggtgcattaccacctgggcagcctggcgctgtccgacctgctcaccctgctgctggccatgcccgtggagctgtacaacttcatctgggtgcaccacccctgggccttcggcgacgccggctgccgcggctactacttcctgcgcgacgcctgcacctacgccacggccctcaacgtggccagcctgagtgtggagcgctacctggccatctgccaccccttcaaggccaagaccctcatgtcccgaagccgcaccaagaagttcatcagcgccatctggctcgcctcggccctgctgacggtgcctatgctgttcaccatgggcgagcagaaccgcagcgccgacggccagcacgccggcggcctggtgtgcacccccaccatccacactgccaccgtcaaggtcgtcatacaggtcaacaccttcatgtccttcatattccccatggtggtcatctcggtcctgaacaccatcatcgccaacaagctgaccgtcatggtacgccaggcggccgagcagggccaagtgtgcacggtcgggggcgagcacagcacattcagcatggccatcgagcctggcagggtccaggccctgcggcacggcgtgcgcgtcctacgtgcagtggtcatcgcctttgtggtctgctggctgccctaccacgtgcggcgcctcatgttctgctacatctcggatgagcagtggactccgttcctctatgacttctaccactacttctacatggtgaccaacgcactcttctacgtcagctccaccatcaaccccatcctgtacaacctcgtctctgccaacttccgccacatcttcctggccacactggcctgcctctgcccggtgtggcggcgcaggaggaagaggccagccttctcgaggaaggccgacagcgtgtccagcaaccacaccctctccagcaatgccacccgcgagacgctgtactaggctgtgcgccccggaacgtgtccaggaggagcctggccatgggtccttgcccccgacagacagagcagcccccacccgggagccttgatgggggtcaggcagaggccagcctgcactggagtctgaggcctgggacccccccctcccaccccctaacccatgtttctcattagtgtctcccgggcctgtccccaactcctccccacccctcccccatctcctctttgaaagccagaacaagagagcgctcctctcccagataggaaaagggcctctaacaaggagaaattagtgtgcggcaaaaggcagttttctttgttctcagactaatggatggttccagagaaggaaatgaaatgtgctgggtggggccgggcctccggcggcccggctgctgttcccatgtccacatctctgaggcctgcaccccctctgtctagctcggggagtccagccccagtcccgcaggctccgtggctttgggcctcacgtgcagaccctgccatgcagacccatgcccccctcccccaggcagctccaagaaagctccctgactcgccccttcaggcctggcaagctgggggcccatcgccgtggggagtccctcccaccaccctcgccgcaggcagctgcagcccccagaggggaccacaagcccaaaaaggacaaaaatgggctggcctggaatggcccagaccccagcctcccctcctccctcccatcctcacccaggccaaggcccaggggctctgccaggacaccacatgggagggggctcaggcctcagcctcaagatcttcagctgtggcctctcgggctcggcagaagggacgccggatcaggggcctggtctccagcacctgcccgagtggccgtggccaggatggggtgcgcattccgtgtgctttgcttgtagctgtgcaggctgaggtctggagccaggcccagagctggcttcagggtggggccttgagaaggggaatgtgggacaggggcgatggtgcctggtctctgagtaagatgccaggtcccaggaactcaggcttcaggtgagaaggagcggtgtgtccaggcaccgctggccggcagccctgggctgaggcacagactcatttgtcaccttctggcggcggcagccctggccccggcctccaagcagttgaaaaagctggcgcctccttggtctctaggatccaggctccacagagcacatgactagccaggcccctggcttaagaaggtcgcctaagcctaagagaagacagtcccaggagaagctggccgggaccagccaggagctgggagccacaggaagcaaaagtcagccttttcttcaagggatttccctgtctcagagcagcctttgccccagggaaatgggctctgggctggctgcctgcaccggccatgtcgacccaggacccggacacctggtcttgggctgtgttcagccactttgccttctctggactcagtttccccgtctgagaaatgagagtcgaatgctacagtatctgcagtcgcttggatctggctgttgagttgacgggttccttgaaccccacaaaatccctctccaaccacaggacccttcggctcaccaagaacggggcccaggggagtcaggcctattcgctgcacttcctgccaaactttgcccccacaagcctggtcatcagccaggcagccctcccagtgcccaagggccaccaaccccagggaaacagggccagcacagaggggccttcctcccccacagagctcccatgacatagtctgctctgggcggaagagctttgctgccagccagggatgtccagaggtcggtgcagcccctatccctgctcaggagtgggctcagagtctagcaaatgctaaggcccctcaggctgggctctgaacgaggacctggactcagagccagacagggcagcctcagacccttctctggggctcctggaccttgggccataatttctgagcctcggtttccccatctaaggaacagatgtggtcgttccgccctctcagctggatgagactgtcctggaggatccaccccggaacagacagaacggtgtctctcaggatggtgctctgagagagggcagagtggatgccccactgccctagaccctcggtagacgtggggtctctggggcggggtctgtggctgtgactgaagtcggctttcccgttgatgtcttgatgctcctatctgtgcacttaccgtaggtagggacacgtgtccatgcaccacagacacacccacgacacctgatctcgtatcactagcttgcggccaggtcatgatgtggccccggaagctggccctgcgtgccatgagtgcgtcggtcatggagtccggagcccctgagccggcccctggtgacggcacagccctcacagctcaaacgcccacccccactcccaccatctgcaggtggtgaaaacaaaccccgtgtatctctcaataaaggtggccgaagggcctcgatgtgg

SEQ ID NO: 207 - protein, 418 aa, Homo sapiens
MRLNSSAPGTPGTPAADPFQRAQAGLEEALLAPGFGNASGNASERVLAAPSSELDVNTDIYSKVLVTAVYLALFVVGTVGNTVTAFTLARKKSLQSLQSTVHYHLGSLALSDLLTLLLAMPVELYNFIWVHHPWAFGDAGCRGYYFLRDACTYATALNVASLSVERYLAICHPFKAKTLMSRSRTKKFISAIWLASALLTVPMLFTMGEQNRSADGQHAGGLVCTPTIHTATVKVVIQVNTFMSFIFPMVVISVLNTIIANKLTVMVRQAAEQGQVCTVGGEHSTFSMAIEPGRVQALRHGVRVLRAVVIAFVVCWLPYHVRRLMFCYISDEQWTPFLYDFYHYFYMVTNALFYVSSTINPILYNLVSANFRHIFLATLACLCPVWRRRRKRPAFSRKADSVSSNHTLSSNATRETLY

SEQ ID NO: 208 - DNA, 2534 bp, Homo sapiens
cctgctctgcacctgtcgtcgactgccagccggctgagggcgggggtctccacggtggtcccagctcccaaggaggttgcagaagtaccgtacagagtggatttgcagggcagtggcatggagcccctcttccccgcgccgttctgggaggttatctacggcagccaccttcagggcaacctgtccctcctgagccccaaccacagtctgctgcccccgcatctgctgctcaatgccagccacggcgccttcctgcccctcgggctcaaggtcaccatcgtggggctctacctggccgtgtgtgtcggagggctcctggggaactgccttgtcatgtacgtcatcctcaggcacaccaaaatgaagacagccaccaatatttacatctttaacctggccctggccgacactctggtcctgctgacgctgcccttccagggcacggacatcctcctgggcttctggccgtttgggaatgcgctgtgcaagacagtcattgccattgactactacaacatgttcaccagcaccttcaccctaactgccatgagtgtggatcgctatgtagccatctgccaccccatccgtgccctcgacgtccgcacgtccagcaaagcccaggctgtcaatgtggccatctgggccctggcctctgttgtcggtgttcccgttgccatcatgggctcggcacaggtcgaggatgaagagatcgagtgcctggtggagatccctacccctcaggattactggggcccggtgtttgccatctgcatcttcctcttctccttcatcgtccccgtgctcgtcatctctgtctgctacagcctcatgatccggcggctccgtggagtccgcctgctctcgggctcccgagagaaggaccggaacctgcggcgcatcactcggctggtgctggtggtagtggctgtgttcgtgggctgctggacgcctgtccaggtcttcgtgctggcccaagggctgggggttcagccgagcagcgagactgccgtggccattctgcgcttctgcacggccctgggctacgtcaacagctgcctcaaccccatcctctacgccttcctggatgagaacttcaaggcctgcttccgcaagttctgctgtgcatctgccctgcgccgggacgtgcaggtgtctgaccgcgtgcgcagcattgccaaggacgtggccctggcctgcaagacctctgagacggtaccgcggcccgcatgactaggcgtggacctgcccatggtgcctgtcagcccgcagagcccatctacgcccaacacagagctcacacaggtcactgctctctaggcggacacaccctgggccctgagcatccagagcctgggatgggcttttccctgtgggccagggatgctcggtcccagaggaggacctagtgacatcatgggacaggtcaaagcattagggccacctccatggccccagacagactaaagctgccctcctggtgcagggccgaggggacacaaggacctacctggaagcagctgacatgctggtggacggccgttactggagcccgtgcccctccctccccgtgcttcatgtgactcttggcctctctgctgctgcgttggcagaaccctgggtgggcaggcacccggaggaggagcagcagctgtgtcatcctgtgccccccatgtgctgtgtgctgtttgcatggcagggctccagctgccttcagccctgtgacgtctcctcagggcagctggacaggcttggcacggcccgggaagtgcagcaggcagcttttctttggggtgggacttgccctgagcttggagctgccacctggaggacttgcctgttccgactccacctgtgcagccggggccaccccaggagaaagtgtccaggtgggggctggcagtccctggctgcagaccccgagctggccctcggaccgcacctctgaaggttttctgtgtgctgcacggtgcaggcctcatccctgactgcagcttgactctgggcccaacccccatttcccttcaggagaccagcgagaggccctggccatccctccagcggtgcaatgaactatatgctgtggaccgtcaacccagccctgcttctcagtgtggggcaggtgtctcaggacgaaggcgccgcgtgaccacatgggcagctctgttcacaaagtggaggcctcgttttcctggtcttgactgctctgtttgggtgggagaagattctctgggggtccccacatcctcccaaggctcccctcacagcctctcctttgcttgaagccagaggtcagtggccgtgctgtgttgcggggaagctgtgtggaaggagaagctggtggccacagcagagtcctgctctggggacgcctgcttcatttacaagcctcaagatggctctgtgtagggcctgagcttgctgcccaacgggaggatggcttcacagcagagccagcatgaggggtggggcctggcagggcttgcttgagccaaactgcaaaggctgtggtggctgtgaggacactgcgggggttg

SEQ ID NO: 209 - protein, 370 aa, Homo sapiens
MEPLFPAPFWEVIYGSHLQGNLSLLSPNHSLLPPHLLLNASHGAFLPLGLKVTIVGLYLAVCVGGLLGNCLVMYVILRHTKMKTATNIYIFNLALADTLVLLTLPFQGTDILLGFWPFGNALCKTVIAIDYYNMFTSTFTLTAMSVDRYVAICHPIRALDVRTSSKAQAVNVAIWALASVVGVPVAIMGSAQVEDEEIECLVEIPTPQDYWGPVFAICIFLFSFIVPVLVISVCYSLMIRRLRGVRLLSGSREKDRNLRRITRLVLVVVAVFVGCWTPVQVFVLAQGLGVQPSSETAVAILRFCTALGYVNSCLNPILYAFLDENFKACFRKFCCASALRRDVQVSDRVRSIAKDVALACKTSETVPRPA

SEQ ID NO: 210 - DNA, 1607 bp, Homo sapiens
atgacccaggcaggccggcggggtcctggcacacccgagccgcgtccgcgaacacagcccatggcctccccgcgcctagggaccttctgctgccccacgcgggacgcagccacgcagctcgtgctgagcttccagccgcgggccttccacgcgctctgcctgggcagcggcgggctccgcttggcgctgggccttctgcagctgctgcccggccgccggcccgcgggccccgggtcccccgcgacgtccccgccggcctcggtccgcatcctgcgcgctgccgctgcctgcgaccttctcggctgcctgggtatggtgatccggtccaccgtgtggttaggattcccaaattttgttgacagcgtctcggatatgaaccacacggaaatttggcctgctgctttctgcgtggggagtgcgatgtggatccagctgttgtacagtgcctgcttctggtggctgttttgctatgcagtggatgcttatctggtgatccggagatcggcaggactgagcaccatcctgctgtatcacatcatggcgtggggcctggccaccctgctctgtgtggagggagccgccatgctctactacccttccgtgtccaggtgtgagcggggcctggaccacgccatcccccactatgtcaccatgtacctgcccctgctgctggttctcgtggcgaaccccatcctgttccaaaagacagtgactgcagtggcctctttacttaaaggaagacaaggcatttacacggagaacgagaggaggatgggagccgtgatcaagatccgatttttcaaaatcatgctggttttaattatttgttggttgtcgaatatcatcaatgaaagccttttattctatcttgagatgcaaacagatatcaatggaggttctttgaaacctgtcagaactgcagccaagaccacatggtttattatgggaatcctgaatccagcccagggatttctcttgtctttggccttctacggctggacaggatgcagcctgggttttcagtctcccaggaaggagatccagtgggaatcactgaccacctcggctgctgagggggctcacccatccccactgatgccccatgaaaaccctgcttccgggaaggtgtctcaagtgggtgggcagacttctgacgaagccctgagcatgctgtctgaaggttctgatgccagcacaattgaaattcacactgcaagtgaatcctgcaacaaaaatgagggtgaccctgctctcccaacccatggagacctatgaaggggatgtgctgggggtccagaccccatattcctcagactcaacaattcttgttctttagaactgtgttctcaccttcccaacactgcactgccgaagtgtagcggcccccaaaccttgctctcatcaccagctagagcttcttcccgaagggcctttaggataggagaaagggttcatgcacacacgtgtgagaatggaagagccccctccagaccactctacagctgctctagccttagttgccactaggaagttttctgaggctggctgtaaagtaagtgtaaggtccacatccttggggaagtagttaaataaaatagttatgactg

SEQ ID NO: 211 - protein, 424 aa, Homo sapiens
MTQAGRRGPGTPEPRPRTQPMASPRLGTFCCPTRDAATQLVLSFQPRAFHALCLGSGGLRLALGLLQLLPGRRPAGPGSPATSPPASVRILRAAAACDLLGCLGMVIRSTVWLGFPNFVDSVSDMNHTEIWPAAFCVGSAMWIQLLYSACFWWLFCYAVDAYLVIRRSAGLSTILLYHIMAWGLATLLCVEGAAMLYYPSVSRCERGLDHAIPHYVTMYLPLLLVLVANPILFQKTVTAVASLLKGRQGIYTENERRMGAVIKIRFFKIMLVLIICWLSNIINESLLFYLEMQTDINGGSLKPVRTAAKTTWFIMGILNPAQGFLLSLAFYGWTGCSLGFQSPRKEIQWESLTTSAAEGAHPSPLMPHENPASGKVSQVGGQTSDEALSMLSEGSDASTIEIHTASESCNKNEGDPALPTHGDL

SEQ ID NO: 212 - DNA, 2416 bp, Homo sapiens
gaacagtgttaccttggagcctacaatgagaggtatttcaaaatgagtgaagcatgactctcacagatgaaggcctagacgcaggatctttaatggaaaaacacttgggccacttcaagacgacaaacgctcactgggcaaaacaccttcactgaaaagagacctcatattatgcaaaaaaaatcttaagaggcctctgccttcagaagttacaagatgatcaattcaacctccacacagcctccagatgaatcctgctctcagaacctcctgatcactcagcagatcattcctgtgctgtactgtatggtcttcattgcgggaatcctactcaatggagtgtcaggatggatattcttttacgtgcccagctctaagagtttcatcatctatctcaagaacattgttattgctgactttgtgatgagcctgacttttcctttcaagatccttggtgactcaggccttggtccctggcagctgaacgtgtttgtgtgcagggtctctgccgtgctcttctacgtcaacatgtacgtcagcattgtgttctttgggctcatcagctttgacaggtattataaaattgtaaagcctctttggacttctttcatccagtcagtgagttacagcaaacttctgtcagtgatagtatggatgctcatgctcctccttgctgttccaaatattattctcaccaaccagagtgttagggaggttacacaaataaaatgtatagaactgaaaagtgaactgggacggaagtggcacaaagcatcaaactacatcttcgtggccatcttctggattgtgtttcttttgttaatcgttttctatactgctatcacaaagaaaatctttaagtcccaccttaagtcaagtcggaattccacttcggtcaaaaagaaatctagccgcaacatattcagcatcgtgtttgtgttttttgtctgttttgtaccttaccatattgccagaatcccctacacaaagagtcagaccgaagctcattacagctgccagtcaaaagaaatcttgcggtatatgaaagaattcactctgctactatctgctgcaaatgtatgcttggaccctattatttatttctttctatgccagccgtttagggaaatcttatgtaagaaattgcacattccattaaaagctcagaatgacctagacatttccagaatcaaaagaggaaatacaacacttgaaagcacagatactttgtgagttcctaccctcttccaaagaaagaccacgtgtgcatgttgtcatcttcaattacataacagaaatcaataagatatgtgccctcatcataaatatcatctctagcactgccatccaatttagttcaataaaattcaaatataagtttccatgcttttttgtaacatcaaagaaaacatacccatcagtaatttctctaatactgacctttctattctctattaataaaaaattaatacatacaattattcaattctattatattaaaataagttaaagtttataaccactagtctggtcagttaatgtagaaatttaaatagtaaataaaacacaacataatcaaagacaactcactcaggcatcttctttctctaaataccagaatctagtatgtaattgttttcaacactgtccttaaagactaacttgaaagcaggcacagtttgatgaagggctagagagctgtttgcaataaaaagtcaggtttttttcctgatttgaagaagcaggaaaagctgacacccagacaatcacttaagaaaccccttattgatgtatttcatggcactgcaaaggaagaggaatattaattgtatacttagcaagaaaattttttttttctgatagcactttgaggatattagatacatgctaaatatgttttctacaaagacttacgtcatttaatgagcctggggttctggtgttagaatatttttaagtaggctttactgagagaaactaaatattggcatacgttatcagcaacttcccctgttcaatagtatgggaaaaataagatgactgggaaaaagacacacccacaccgtagaacatatattaatctactggcgaatgggaaaggagaccattttcttagaaagcaaataaacttgatttttttaaatctaaaatttacattaatgagtgcaaaataacacataaaatgaaaattcacacatcacatttttctggaaaacagacggattttacttctggagacatggcatacggttactgacttatgagctaccaaaactaaattctttctctgctattaactggctagaagacattcatctatttttcaaatgttctttcaaaacatttttataagtaatgtttgtatctatttcatgctttactgtctatatactaataaagaaatgttttaatactg

SEQ ID NO: 213 - protein, 338 aa, Homo sapiens
MINSTSTQPPDESCSQNLLITQQIIPVLYCMVFIAGILLNGVSGWIFFYVPSSKSFIIYLKNIVIADFVMSLTFPFKILGDSGLGPWQLNVFVCRVSAVLFYVNMYVSIVFFGLISFDRYYKIVKPLWTSFIQSVSYSKLLSVIVWMLMLLLAVPNIILTNQSVREVTQIKCIELKSELGRKWHKASNYIFVAIFWIVFLLLIVFYTAITKKIFKSHLKSSRNSTSVKKKSSRNIFSIVFVFFVCFVPYHIARIPYTKSQTEAHYSCQSKEILRYMKEFTLLLSAANVCLDPIIYFFLCQPFREILCKKLHIPLKAQNDLDISRIKRGNTTLESTDTL

SEQ ID NO: 214 - DNA, 4357 bp, Homo sapiens
tgttaaggctctgggaccaacgctgggcgaaccagctccgctccggaggggtctgcgcggctggcctcgcccgccccctagcggacccgtgcgatagtgcagcctcagccccaggcacagcgccgcatccagacgccgtccgcgcgcgcagcctgggaggcgctcctcgctcgcctcctgtacccatccagcgaccagccaggctgcggcgaggggattccaaccgaggctccagtgagagacctcagcttagcatcacattaggtgcagccggcaggccatcccaactcgggccgggagcgcacgcgtcactggggccgtcagtcgccgtgcaacttccccggggggagtcaactttaggttcgcctgcggactcggtgcagtggaagccgctgaacatcccgaggaactggcacgctgggggctctgggcttgtggccggtagaggattcccgctcatttgcagtggctcagaggagggtggacccagcagatccgtccgtggagtctccaggagtggagccccgggcgcccctacaccctccgacacgccggatccggcccagccgcgccaagccgtaaagggctcgaaggccggggcgcaccgctgccgccagggtcatggagggcgcgctcgcagccaactggagcgccgaggcagccaacgccagcgccgcgccgccgggggccgagggcaaccgcaccgccggacccccgcggcgcaacgaggccctggcgcgcgtggaggtggcggtgctgtgtctcatcctgctcctggcgctgagcgggaacgcgtgtgtgctgctggcgctgcgcaccacacgccagaagcactcgcgcctcttcttcttcatgaagcacctaagcatcgccgacctggtggtggcagtgtttcaggtgctgccgcagttgctgtgggacatcaccttccgcttctacgggcccgacctgctgtgccgcctggtcaagtacttgcaggtggtgggcatgttcgcctccacctacctgctgctgctcatgtccctggaccgctgcctggccatctgccagccgctgcgctcgctgcgccgccgcaccgaccgcctggcagtgctcgccacgtggctcggctgcctggtggccagcgcgccgcaggtgcacatcttctctctgcgcgaggtggctgacggcgtcttcgactgctgggccgtcttcatccagccctggggacccaaggcctacatcacatggatcacgctagctgtctacatcgtgccggtcatcgtgctcgctacctgctacggccttatcagcttcaagatctggcagaacttgcggctcaagaccgctgcagcggcggcggccgaggcgccagagggcgcggcggctggcgatggggggcgcgtggccctggcgcgtgtcagcagcgtcaagctcatctccaaggccaagatccgcacggtcaagatgactttcatcatcgtgctggccttcatcgtgtgctggacgcctttcttcttcgtgcagatgtggagcgtctgggatgccaacgcgcccaaggaagcctcggccttcatcatcgtcatgctcctggccagcctcaacagctgctgcaacccctggatctacatgctgttcacgggccacctcttccacgaactcgtgcagcgcttcctgtgctgctccgccagctacctgaagggcagacgcctgggagagacgagtgccagcaaaaagagcaactcgtcctcctttgtcctgagccatcgcagctccagccagaggagctgctcccagccatccacggcgtgacccaccagccagggccagggctgcagcctgaggctcaggctgtgctggcataagtgctctgctcctaggtgatggcgtatgtttgtgtataaggtacctatcagtttgtatccctcccctccttggggtggcttcagtggggtggagagtggcctccatgatggaagatgataggggactcagccatcagacaacaccctggcctcctacacgtacttctaccaccctgaacccactgctgccctgggcagtgagtggcttgttttttctcctggacttgtaatttcactccagtatatttttacttcttcattctgggatattgtgaaaagcggtaaatataggattggtgaccaattgggtcaggaagtccagtgttctggacttggggtaagcagtggggttgggacctcagatgggaagggtggtgctaagatcctcctgacctcaaagtgtatttgcctttaagcgaacaaatgctggggtccttggggaccagcttgtcagagggtagccctaagagaaggggattaccttgtaagaccatctggcgcagtggacctattagaacttgggttaaaaatgtttaagaagctaatgtttaagaagcatttgggaaagaaaaagaaataaatgtatccagataggaaaagaagaagtaaaactatttgcagatgacacagttttgtatatagaaaatcctaaggaactcacacacacacacacacacacacacgcacacagctattagaactaataagcaagttccgcaaggtttcaagatacaagatcaatatacaaaaatgaattgtatttctttatactagcaacaaacaatatgaaaacgaagttaaataattccatttataataccatcagaaagaataaaataggaatcaacttaacaaaacaagtgcaagactgaaaactacaaaattggaaagaaattaaagaaggcttaaataaatggaaagacatcctgtgttcatggatcagacttagtattgttaagatggcaatactatcctaactgacatgcagattcagtgcaatccttatgaaaatcatagctggcttttttacagaaattgataagctagtcccaaaattcataaagaaatgcaagggacccagatatccaaataagccttgaaaaagaacaaagttggtggattcacacttcctgatttcataatttacgataaaggtaatcagctcagtgtgttactggtttaaggatagacatacggagcagaataaagagtacagatatgaacacttatacttacggtcaattgatttttgacaaggttcccaagacaattcaatagagaaaggagagtcttttcaacaaatggcaccgagacaatgatatgcaagtgcaaaagaatgaggttggacctttactcacactatgtgcaaaaatcaactcaaaacgcatccaagatctaaatataagagctgaaactataaaatcttagaaagaaacataggcatagatctttgtaaccttgaattaggcagtggtttcttagatatgataccaaagacacaagcaaccaatggaaaaataggtaaattggacttaatcaagatttgaagcttttgtgattgaaaagaccctatcaagaaggtgaaaagataacctgcagaatgggagaaaatatttgcgagtcatatatatgataaggggcttgtatctggaatatataaataactcttataacacaacaataaggagaaaaataaatcaatttaaaaaatgggctaacggtttgaatagacatttctccaaagaagatatgcaaatggctactaagcacatgaaaaatactcaacattattattcattagggaaatgcaagtcaaaatcacaatgagattccagtttacaatcactaggatggctacaataaaaagatggacaagaacgagtgtcggtgaggatgtagagaaactggtagaaatttaaattgttggtgggaatgtaaatggtgcacctgctttgaaaaacagtttggcagtacctcaaaaagttaaacgtagagtgaccatatgacccaggaatgccactcctaggtatttacccaagagaaatgaaaacgtacatacacacaaaaacttgtacaccaatgttcatagcaacattatttgtaatagccaaaaagtggaaacaacccaaatgtctaccaactgatgaatgggaaataaaatgtggtctgtccacgcaatggaacattattagactctaaaaagaaatgaagtactcacacatgccacaacatggatgagccttgaaaacttgctaagtgaaagaagccaggtgcaaaagcccacatattgtctgactgcattgaaatgcaatgtctaaaatggacgaatctatatagagtgaatatagattagcgtttgccagggcctggaggctgtgagagatgaggcatgactactaagggtttggggtttctttttcgggtgatgaaaatgttcgaaattagtggtgattgtgcacgattttgagaatgtactaaaaaccaatgaactttaaaaaataaaaataaacaaa

SEQ ID NO: 215 - protein, 389 aa, Homo sapiens [sequence omitted]

SEQ ID NO: 216 - DNA, 2025 bp, Homo sapiens
cggcacgaggcaccccgagaggagaagcgcagcgcagtggcgagaggagccccttgtggcagcagcactacctgcccagaaaaatgctggaggctgggcgtggccccaggcctggggacctgtttttcctgtttcccgcagagttccctgcagcccggtccaggtccaggcgtgtgcattcatgagtgaggaacccgtgcaggcgctgagcatcctgacctggagagcaggggctggtcagggcgatggcagcagacctgggcccctggaatgacaccatcaatggcacctgggatggggatgagctgggctacaggtgccgcttcaacgaggacttcaagtacgtgctgctgcctgtgtcctacggcgtggtgtgcgtgcttgggctgtgtctgaacgccgtggcgctctacatcttcttgtgccgcctcaagacctggaatgcgtccaccacatatatgttccacctggctgtgtctgatgcactgtatgcggcctccctgccgctgctggtctattactacgcccgcggcgaccactggcccttcagcacggtgctctgcaagctggtgcgcttcctcttctacaccaacctttactgcagcatcctcttcctcacctgcatcagcgtgcaccggtgtctgggcgtcttacgacctctgcgctccctgcgctggggccgggcccgctacgctcgccgggtggccggggccgtgtgggtgttggtgctggcctgccaggcccccgtgctctactttgtcaccaccagcgcgcgcgggggccgcgtaacctgccacgacacctcggcacccgagctcttcagccgcttcgtggcctacagctcagtcatgctgggcctgctcttcgcggtgccctttgccgtcatccttgtctgttacgtgctcatggctcggcgactgctaaagccagcctacgggacctcgggcggcctccctagggccaagcgcaagtccgtgcgcaccatcgccgtggtgctggctgtcttcgccctctgcttcctgccattccacgtcacccgcaccctctactactccttccgctcgctggacctcagctgccacaccctcaacgccatcaacatggcctacaaggttacccggccgctggccagtgctaacagttgccttgaccccgtgctctacttcctggctgggcagaggctcgtacgctttgcccgagatgccaagccacccactggccccagccctgccaccccggctcgccgcaggctgggcctgcgcagatccgacagaactgacatgcagaggataggagatgtgttgggcagcagtgaggacttcaggcggacagagtccacgccggctggtagcgagaacactaaggacattcggctgtaggagcagaacacttcagcctgtgcaggtttatattgggaagctgtagaggaccaggacttgtgcagacgccacagtctccccagatatggaccatcagtgactcatgctggatgaccccatgctccgtcatttgacaggggctcaggatattcactctgtggtccagagtcaactgttcccataacccctagtcatcgtttgtgtgtataagttgggggaattaagtttcaagaaaggcaagagctcaaggtcaatgacacccctggcctgactcccatgcaagtagctggctgtactgccaaggtacctaggttggagtccagcctaatcaagtcaaatggagaaacaggcccagagaggaaggtggcttaccaagatcacataccagagtctggagctgagctacctggggtgggggccaagtcacaggttggccagaaaaccctggtaagtaatgagggctgagtttgcacagtggtctggaatggactgggtgccacggtggacttagctctgaggagtacccccagcccaagagatgaacatctggggactaatatcatagacccatctggaggctcccatgggctaggagcagtgtgaggctgtaacttatactaaaggttgtgttgcctgctaaaaaaaa

SEQ ID NO: 217 - protein, 377 aa, Homo sapiens [sequence omitted]

SEQ ID NO: 218 - DNA, 2424 bp, Homo sapiens
ccccctcccgcggggatccagttcgcctgctcccttccgctcgctggcttttccgatgcttgctgcgcccctggccgccgctgccctctcgccgcctcctacccctcggagccgccgcctaagtcgaggaggagagaatgaccgaggtgctgtggccggctgtccccaacgggacggacgctgccttcctggccggtccgggttcgtcctgggggaacagcacggtcgcctccactgccgccgtctcctcgtcgttcaaatgcgccttgaccaagacgggcttccagttttactacctgccggctgtctacatcttggtattcatcatcggcttcctgggcaacagcgtggccatctggatgttcgtcttccacatgaagccctggagcggcatctccgtgtacatgttcaatttggctctggccgacttcttgtacgtgctgactctgccagccctgatcttctactacttcaataaaacagactggatcttcggggatgccatgtgtaaactgcagaggttcatctttcatgtgaacctctatggcagcatcttgtttctgacatgcatcagtgcccaccggtacagcggtgtggtgtaccccctcaagtccctgggccggctcaaaaagaagaatgcgatctgtatcagcgtgctggtgtggctcattgtggtggtggcgatctcccccatcctcttctactcaggtaccggggtccgcaaaaacaaaaccatcacctgttacgacaccacctcagacgagtacctgcgaagttatttcatctacagcatgtgcacgaccgtggccatgttctgtgtccccttggtgctgattctgggctgttacggattaattgtgagagctttgatttacaaagatctggacaactctcctctgaggagaaaatcgatttacctggtaatcattgtactgactgtttttgctgtgtcttacatccctttccatgtgatgaaaacgatgaacttgagggcccggcttgattttcagaccccagcaatgtgtgctttcaatgacagggtttatgccacgtatcaggtgacaagaggtctagcaagtctcaacagttgtgtggaccccattctctatttcttggcgggagatactttcagaaggagactctcccgagccacaaggaaagcttctagaagaagtgaggcaaatttgcaatccaagagtgaagacatgaccctcaatattttacctgagttcaagcagaatggagatacaagcctgtgaaggcacaagaatctccaaacacctctctgttgtaatatggtaggatgcttaacagaatcaagtacttttcccctctttaactttctagtttagaaaaaaatcaaaccaagaaaatagtgagttaaaaaaataatagaagtagaaatgcccacatccacacttagcttgtttgggtttgctttcacagtctctcttccttctgactagaagtatgtataataaaacaatactacctagttaaacatttactttctcttttgcctttaaaatgtgcaggcttttctgtttaaagtgtgtgtgcacatgagtactggggctgtttttgatattagtaatttctctaagaaaactagccccctgcaacttgagtttgtggtttatctagcctttattgtttttttaaaatccacagtaggaataaaaaatctatattctcagaaatatctagcatggtatataacaaaacactaaactcatcagttcatccggcatcagatcaatggatctctgagcggggtgtttttttcagtgtcttataagcatagatgatagttgactgagtttctttagggcattgaatagacaagtaaagctaatgaatttaaaagcctgaaaagtgattgttttccagttatttctggaaaaggtctcattatatattgggtgctaaatgtttgatggggaaagcctgcatatattatcgtactggtaaaatgcattcaaaataattaaagtgcatgtattttccttgtaaacaccatgagctctcttagacatcttgtgataaagagcatttacttgccccactgctgtgcaatgccttaggactttgtttgtgttccaggacaagtgttcactcacatctgtaaaaacaattttaagaattgcaaataaattacagaccaaagattgagtaaagtcaaataactgttagtaagttgaaggatattggacaggaggacagtatttcagaaaaggagaggttgacagtcatccacaaggcatagcctccaagtatactctcaaatgtatgaagcaactggggtgggcagaagacattttagaatgagggcctttagtttaaattaaagtcatggtggagaagactcttgcttccaccaagtgtttgaaaacacaaaatacgatataaaaaaaaaaaaaaaaa

SEQ ID NO: 219 - protein, 373 aa, Homo sapiens
MTEVLWPAVPNGTDAAFLAGPGSSWGNSTVASTAAVSSSFKCALTKTGFQFYYLPAVYILVFIIGFLGNSVAIWMFVFHMKPWSGISVYMFNLALADFLYVLTLPALIFYYFNKTDWIFGDAMCKLQRFIFHVNLYGSILFLTCISAHRYSGVVYPLKSLGRLKKKNAICISVLVWLIVVVAISPILFYSGTGVRKNKTITCYDTTSDEYLRSYFIYSMCTTVAMFCVPLVLILGCYGLIVRALIYKDLDNSPLRRKSIYLVIIVLTVFAVSYIPFHVMKTMNLRARLDFQTPAMCAFNDRVYATYQVTRGLASLNSCVDPILYFLAGDTFRRRLSRATRKASRRSEANLQSKSEDMTLNILPEFKQNGDTSL

SEQ ID NO: 220 - DNA, 1118 bp, Homo sapiens
ctgatgaaagtgcttccaaactgaaaattggacgtgcctttacgatggtaagcgttaacagctcccactgcttctataatgactcctttaagtacactttgtatgggtgcatgttcagcatggtgtttgtgcttgggttagtatccaattgtgttgccatatacattttcatctgcgtcctcaaagtccgaaatgaaactacaacttacatgattaacttggcaatgtcagacttgctttttgtttttactttacccttcaggattttttacttcacaacacggaattggccatttggagatttactttgtaagatttctgtgatgctgttttataccaacatgtacggaagcattctgttcttaacctgtattagtgtagatcgatttctggcaattgtctacccatttaagtcaaagactctaagaaccaaaagaaatgcaaagattgtttgcactggcgtgtggttaactgtgatcggaggaagtgcacccgccgtttttgttcagtctacccactctcagggtaacaatgcctcagaagcctgctttgaaaattttccagaagccacatggaaaacatatctctcaaggattgtaattttcatcgaaatagtgggattttttattcctctaattttaaatgtaacttgttctagtatggtgctaaaaactttaaccaaaccagttacattaagtagaagcaaaataaacaaaactaaggttttaaaaatgatttttgtacatttgatcatattctgtttctgttttgttccttacaatatcaatcttattttatattctcttgtgagaacacaaacatttgttaattgctcagtagtggcagcagtaaggacaatgtacccaatcactctctgtattgctgtttccaactgttgttttgaccctatagtttactactttacatcggacacaattcagaattcaataaaaatgaaaaactggtctgtcaggagaagtgacttcagattctctgaagttcatggtgcagagaattttattcagcataacctacagaccttaaaaagtaagatatttgacaatgaatctgctgcctgaaataaaaccattaggactcactgggacagaactttcaag

SEQ ID NO: 221 - protein, 344 aa, Homo sapiens
MVSVNSSHCFYNDSFKYTLYGCMFSMVFVLGLVSNCVAIYIFICVLKVRNETTTYMINLAMSDLLFVFTLPFRIFYFTTRNWPFGDLLCKISVMLFYTNMYGSILFLTCISVDRFLAIVYPFKSKTLRTKRNAKIVCTGVWLTVIGGSAPAVFVQSTHSQGNNASEACFENFPEATWKTYLSRIVIFIEIVGFFIPLILNVTCSSMVLKTLTKPVTLSRSKINKTKVLKMIFVHLIIFCFCFVPYNINLILYSLVRTQTFVNCSVVAAVRTMYPITLCIAVSNCCFDPIVYYFTSDTIQNSIKMKNWSVRRSDFRFSEVHGAENFIQHNLQTLKSKIFDNESAA

SEQ ID NO: 222 - DNA, 1832 bp, Homo sapiens
aaggacagaggaggggcccttcctgtcagctggctgggagcagaggtggctttgtcttttcggaagaactggttctgtggaatttgtgcttatttcccatcaaggatcaaggacctgctctggggctacctcagggccccacaggatgaggggctggttttcagatgagttttctgcttgcctgtcatctggatagtgtctaaaaatttgcaaactgccttcttgtcagtgtcttgctcattcttcatgacactcctgatatgtctctcagtttcctcatctgctgcctctccagacttctgccagaacattgcacgcgacagtttcaggcacagaactgactggcagcaggggctgctccacgagtgggaatttgctccagcacttcacggactgcaagcgaggcacttgctaactcttggataacaagacctctgccagaagaaccatggctttggaaggcggagttcaggctgaggagatgggtgcggtcctcagtgagcccctgcctccctgaacataggaaacccacctgggcagccatggaatgggacaatggcacaggccaggctctgggcttgccacccaccacctgtgtctaccgcgagaacttcaagcaactgctgctgccacctgtgtattcggcggtgctggcggctggcctgccgctgaacatctgtgtcattacccagatctgcacgtcccgccgggccctgacccgcacggccgtgtacaccctaaaccttgctctggctgacctgctatatgcctgctccctgcccctgctcatctacaactatgcccaaggtgatcactggccctttggcgacttcgcctgccgcctggtccgcttcctcttctatgccaacctgcacggcagcatcctcttcctcacctgcatcagcttccagcgctacctgggcatctgccacccgctggccccctggcacaaacgtgggggccgccgggctgcctggctagtgtgtgtagccgtgtggctggccgtgacaacccagtgcctgcccacagccatcttcgctgccacaggcatccagcgtaaccgcactgtctgctatgacctcagcccgcctgccctggccacccactatatgccctatggcatggctctcactgtcatcggcttcctgctgccctttgctgccctgctggcctgctactgtctcctggcctgccgcctgtgccgccaggatggcccggcagagcctgtggcccaggagcggcgtggcaaggcggcccgcatggccgtggtggtggctgctgcctttgccatcagcttcctgccttttcacatcaccaagacagcctacctggcagtgcgctcgacgccgggcgtcccctgcactgtattggaggcctttgcagcggcctacaaaggcacgcggccgtttgccagtgccaacagcgtgctggaccccatcctcttctacttcacccagaagaagttccgccggcgaccacatgagctcctacagaaactcacagccaaatggcagaggcagggtcgctgagtcctccaggtcctgggcagccttcatatttgccattgtgtccggggcaccaggagccccaccaaccccaaaccatgcggagaattagagttcagctcagctgggcatggagttaagatccctcacaggacccagaagctcaccaaaaactatttcttcagccccttctctggcccagaccctgtgggcatggagatggacagacctgggcctggctcttgagaggtcccagtcagccatggagagctggggaaaccacattaaggtgctcacaaaaatacagtgtgacgtgtactgtcaaaa

SEQ ID NO: 223 - protein, 328 aa, Homo sapiens
MEWDNGTGQALGLPPTTCVYRENFKQLLLPPVYSAVLAAGLPLNICVITQICTSRRALTRTAVYTLNLALADLLYACSLPLLIYNYAQGDHWPFGDFACRLVRFLFYANLHGSILFLTCISFQRYLGICHPLAPWHKRGGRRAAWLVCVAVWLAVTTQCLPTAIFAATGIQRNRTVCYDLSPPALATHYMPYGMALTVIGFLLPFAALLACYCLLACRLCRQDGPAEPVAQERRGKAARMAVVVAAAFAISFLPFHITKTAYLAVRSTPGVPCTVLEAFAAAYKGTRPFASANSVLDPILFYFTQKKFRRRPHELLQKLTAKWQRQGR

SEQ ID NO: 224 - DNA, 2299 bp, Homo sapiens
cctaccggtccatagtgtcagagtggtgaacccctgcagccagcaggcctcctgaaaaaaaagtccatgggtgacagaagattcattgacttccaattccaagattcaaattcaagcctcagacccaggttgggcaatgctactgccaataatacttgcattgttgatgattccttcaagtataatctcaatggtgctgtctacagtgttgtattcatcttgggtctgataaccaacagtgtctctctgtttgtcttctgtttccgcatgaaaatgagaagtgagactgctatttttatcaccaatctagctgtctctgatttgctttttgtctgtacactaccttttaaaatattttacaacttcaaccgccactggccttttggtgacaccctctgcaagatctctggaactgcattccttaccaacatctatgggagcatgctctttctcacctgtattagtgtggatcgtttcctggccattgtctatccttttcgatctcgtactattaggactaggaggaattctgccattgtgtgtgctggtgtctggatcctagtcctcagtggcggtatttcagcctctttgttttccaccactaatgtcaacaatgcaaccaccacctgctttgaaggcttctccaaacgtgtctggaagacttatttatccaagatcacaatatttattgaagttgttgggtttatcattcctctaatattgaatgtctcttgctcttctgtggtgctgagaactcttcgcaagcctgctactctgtctcaaattgggaccaataagaaaaaagtactgaaaatgatcacagtacatatggcagtctttgtggtatgctttgtaccctacaactctgtcctcttcttgtatgccctggtgcgctcccaagctattactaattgctttttggaaagatttgcaaagatcatgtacccaatcaccttgtgccttgcaactctgaactgttgttttgaccctttcatctattacttcacccttgaatcctttcagaagtccttctacatcaatgcccacatcagaatggagtccctgtttaagactgaaacacctttgaccacaaagccttcccttccagctattcaagaggaagtgagtgatcaaacaacaaataatggtggtgaattaatgctagaatccaccttttaggtatgagaaatgtgttcaggtccagatatggtttctcctataatttttcctatgctataaactaaagatttgaagctaatgatactgagaataatgcaccaaatccagtcagatacatttgtttgaaggtatactgtagagtttttattgctgttttgttcagtaattataggtcaaatctaattacaacaaccaagatggattgccaaactcttctgcttggttggaatttcattgtatcgcattatccaggtggctagtggcatttgataatatagagatgactttgaaactttcaaaaaggtatttctattccaatgatatttggtaattaggttgggcctataaatatagaacaaattcagggatttttaaaaaattgtgttactactgatatatgctagttttattttatttttttggactgtcattgagtttattttagcacaagaatatttttagcctaacattattaataagaaatgtgtcaaatttttaacattggtaaaatatgttatgtgcattttgaaaacagaaaacaaattgcgttggcatgtacgtgggtgggaagaaaaagaaaattaacaggatttacacaattataatcaccagcagtgtgagtttaaaaaacttcgttgtttttacaccaaattaaaattttcatgtcaaacttcaaagccagaaagctgctaaatacgtgtctggcaggtaaaagctggaaaattacttaaaacaggaaagtgtcaataaaaaaacttgagcaacaccaacatattttttcttaaaatgtcacgttatcttcattttgggaaactaggttctataaaatatttatcctccctgttatactttggagcacagcacagccagaaaggggctgcatttgtgcccaggtcaggagcaaattgaaaaaaaaaataaagtaatactaaaaaatcaaactataaacccaaaacatttattaaaacctgaattaatcctttttggagggaggagtagagatatataacctgaaaatacttattctttcttatcgaattttggagcctaatatagccaggagctgctgaatttgtgcccctggattggaaccaaataaaaaaaaaaaaaaaaaattcct

SEQ ID NO: 225 - protein, 370 aa, Homo sapiens
MGDRRFIDFQFQDSNSSLRPRLGNATANNTCIVDDSFKYNLNGAVYSVVFILGLITNSVSLFVFCFRMKMRSETAIFITNLAVSDLLFVCTLPFKIFYNFNRHWPFGDTLCKISGTAFLTNIYGSMLFLTCISVDRFLAIVYPFRSRTIRTRRNSAIVCAGVWILVLSGGISASLFSTTNVNNATTTCFEGFSKRVWKTYLSKITIFIEVVGFIIPLILNVSCSSVVLRTLRKPATLSQIGTNKKKVLKMITVHMAVFVVCFVPYNSVLFLYALVRSQAITNCFLERFAKIMYPITLCLATLNCCFDPFIYYFTLESFQKSFYINAHIRMESLFKTETPLTTKPSLPAIQEEVSDQTTNNGGELMLESTF

SEQ ID NO: 226 - DNA, 2641 bp, Homo sapiens
ggccggtggcccgggcccgaccaccccagctgcgcgtcgttactggccacaagtttgctctgggccagccaagttggcaacttggaagcttctcccgggctctggaggagggtccctgcttcttcctacagccgttccgggcatggccgggctgggggcgtcgctccacgtctggggttggctaatgctcggcagctgcctcctggccagagcccagctggattctgatggcaccattactatagaggagcagattgtccttgtgctgaaagcgaaagtacaatgtgaactcaacatcacagctcaactccaggagggagaaggtaattgtttccctgaatgggatggactcatttgttggcccagaggaacagtggggaaaatatcggctgttccatgccctccttatatttatgacttcaaccataaaggagttgctttccgacactgtaaccccaatggaacatgggattttatgcacagcttaaataaaacatgggccaattattcagactgccttcgctttctgcagccagatatcagcataggaaagcaagaattctttgaacgcctctatgtaatgtataccgttggctactccatctcttttggttccttggctgtggctattctcatcattggttacttcagacgattgcattgcactaggaactatatccacatgcacttatttgtgtctttcatgctgagagctacaagcatctttgtcaaagacagagtagtccatgctcacataggagtaaaggagctggagtccctaataatgcaggatgacccacaaaattccattgaggcaacttctgtggacaaatcacaatatatcgggtgcaagattgctgttgtgatgtttatttacttcctggctacaaattattattggatcctggtggaaggtctctacctgcataatctcatctttgtggctttcttttcggacaccaaatacctgtggggcttcatcttgataggctgggggtttccagcagcatttgttgcagcatgggctgtggcacgagcaactctggctgatgcgaggtgctgggaacttagtgctggagacatcaagtggatttatcaagcaccgatcttagcagctattgggctgaattttattctgtttctgaatacggttagagttctagctaccaaaatctgggagaccaatgcagttgggcatgacacaaggaagcaatacaggaaactggccaaatcgacactggtcctggtcctagtctttggagtgcattacatcgtgttcgtatgcctgcctcactccttcactgggctcgggtgggagatccgcatgcactgtgagctcttcttcaactcctttcagggtttctttgtgtctatcatctactgctactgcaatggagaggttcaggcagaggtgaagaagatgtggagtcggtggaatctctccgtggactggaaaaggacaccgccatgtggcagccgcagatgcggctcagtgctcaccaccgtgacgcacagcaccagcagccagtcacaggtggcggccagcacacgcatggtgcttatctctggcaaagctgccaagatcgccagcagacagcctgacagccacatcactttacctggctatgtctggagtaactcagagcaggactgcctgccacactctttccacgaggagaccaaggaagatagtgggaggcagggagatgatattctaatggagaagccttccaggcctatggaatctaacccagacactgaaggatgccaaggagaaactgaggatgttctctgaatggacatttgtggctgactttcatgggctggtccaatggctggttgtgtgagagggcttggctgatactcctatgcttgagttcaaaggctgaaaattcagttaaggtgttacttaataatagtttttaggctccatgaattggctcctgtaaatactaacgacatgaaaatgcaagtgtcaatggagtagtttattaccttctattggcatcaagttttcctctaaattaatgtatggtatttgctctgtgattgttcatttttttctgctacttttgggtagaaaaaagattcaattgcttggctgtagctttctctcatatatatcaccctaaatataatgaagatcttttagtgtgtatcattttccttttagaaactagtattctcttatttcttactttaatgtacttctatcactgcatttattttgcctgtgcataggagcaattaggatctaaaaaaatatatgggaagataaaagatctaagaacaagtacttgctggaaaattagttggctggacattgataaaataatgcatttataacaattacatgtgtttttgggaacaaggaaaatttctcaaaaaagaatatttcacacatcccttcttttgaatggcctctttgtgaccagccagacctcaggtcttcactctttcttctttgtaaaccatgtcatgtggaaagatttcctcagttagtgagcttgtgtctgcaaattgattttgtttgtaatgtattttgatagcaaatcatgctgcatctatatctttttcttgtttgagctgttactacattgtacatggcatgtgggatcaattaaaaatttgttttaaaaat

SEQ ID NO: 227 - protein, 550 aa, Homo sapiens
MAGLGASLHVWGWLMLGSCLLARAQLDSDGTITIEEQIVLVLKAKVQCELNITAQLQEGEGNCFPEWDGLICWPRGTVGKISAVPCPPYIYDFNHKGVAFRHCNPNGTWDFMHSLNKTWANYSDCLRFLQPDISIGKQEFFERLYVMYTVGYSISFGSLAVAILIIGYFRRLHCTRNYIHMHLFVSFMLRATSIFVKDRVVHAHIGVKELESLIMQDDPQNSIEATSVDKSQYIGCKIAVVMFIYFLATNYYWILVEGLYLHNLIFVAFFSDTKYLWGFILIGWGFPAAFVAAWAVARATLADARCWELSAGDIKWIYQAPILAAIGLNFILFLNTVRVLATKIWETNAVGHDTRKQYRKLAKSTLVLVLVFGVHYIVFVCLPHSFTGLGWEIRMHCELFFNSFQGFFVSIIYCYCNGEVQAEVKKMWSRWNLSVDWKRTPPCGSRRCGSVLTTVTHSTSSQSQVAASTRMVLISGKAAKIASRQPDSHITLPGYVWSNSEQDCLPHSFHEETKEDSGRQGDDILMEKPSRPMESNPDTEGCQGETEDVL

SEQ ID NO: 228 - DNA, 1948 bp, Homo sapiens
cggagggacgcggccctaggcggtggcgatggggaccgcccggatcgcacccggcctggcgctcctgctctgctgccccgtgctcagctccgcgtacgcgctggtggatgcagatgacgtcatgactaaagaggaacagatcttcctgctgcaccgtgctcaggcccagtgcgaaaaacggctcaaggaggtcctgcagaggccagccagcataatggaatcagacaagggatggacatctgcgtccacatcagggaagcccaggaaagataaggcatctgggaagctctaccctgagtctgaggaggacaaggaggcacccactggcagcaggtaccgagggcgcccctgtctgccggaatgggaccacatcctgtgctggccgctgggggcaccaggtgaggtggtggctgtgccctgtccggactacatttatgacttcaatcacaaaggccatgcctaccgacgctgtgaccgcaatggcagctgggagctggtgcctgggcacaacaggacgtgggccaactacagcgagtgtgtcaaatttctcaccaatgagactcgtgaacgggaggtgtttgaccgcctgggcatgatttacaccgtgggctactccgtgtccctggcgtccctcaccgtagctgtgctcatcctggcctactttaggcggctgcactgcacgcgcaactacatccacatgcacctgttcctgtccttcatgctgcgcgccgtgagcatcttcgtcaaggacgctgtgctctactctggcgccacgcttgatgaggctgagcgcctcaccgaggaggagctgcgcgccatcgcccaggcgcccccgccgcctgccaccgccgctgccggctacgcgggctgcagggtggctgtgaccttcttcctttacttcctggccaccaactactactggattctggtggaggggctgtacctgcacagcctcatcttcatggccttcttctcagagaagaagtacctgtggggcttcacagtcttcggctggggtctgcccgctgtcttcgtggctgtgtgggtcagtgtcagagctaccctggccaacaccgggtgctgggacttgagctccgggaacaaaaagtggatcatccaggtgcccatcctggcctccattgtgctcaacttcatcctcttcatcaatatcgtccgggtgctcgccaccaagctgcgggagaccaacgccggccggtgtgacacacggcagcagtaccggaagctgctcaaatccacgctggtgctcatgcccctctttggcgtccactacattgtcttcatggccacaccatacaccgaggtctcagggacgctctggcaagtccagatgcactatgagatgctcttcaactccttccagggattttttgtcgcaatcatatactgtttctgcaatggcgaggtacaagctgagatcaagaaatcttggagccgctggacactggcactggacttcaagcgaaaggcacgcagcgggagcagcagctatagctacggccccatggtgtcccacacaagtgtgaccaatgtcggcccccgtgtgggactcggcctgcccctcagcccccgcctactgcccactgccaccaccaacggccaccctcagctgcctggccatgccaagccagggaccccagccctggagaccctcgagaccacaccacctgccatggctgctcccaaggacgatgggttcctcaacggctcctgctcaggcctggacgaggaggcctctgggcctgagcggccacctgccctgctacaggaagagtgggagacagtcatgtgaccaggcgctgggggctggacctgctgacatagtggatggacagatggaccaaaagatgggtggttgaatgatttcccactcagggcctggggccaagaggaaaaacagggaaaaaaagaaaaaaaaaagaaaaaggaa

SEQ ID NO: 229 - protein, 593 aa, Homo sapiens
MGTARIAPGLALLLCCPVLSSAYALVDADDVMTKEEQIFLLHRAQAQCEKRLKEVLQRPASIMESDKGWTSASTSGKPRKDKASGKLYPESEEDKEAPTGSRYRGRPCLPEWDHILCWPLGAPGEVVAVPCPDYIYDFNHKGHAYRRCDRNGSWELVPGHNRTWANYSECVKFLTNETREREVFDRLGMIYTVGYSVSLASLTVAVLILAYFRRLHCTRNYIHMHLFLSFMLRAVSIFVKDAVLYSGATLDEAERLTEEELRAIAQAPPPPATAAAGYAGCRVAVTFFLYFLATNYYWILVEGLYLHSLIFMAFFSEKKYLWGFTVFGWGLPAVFVAVWVSVRATLANTGCWDLSSGNKKWIIQVPILASIVLNFILFINIVRVLATKLRETNAGRCDTRQQYRKLLKSTLVLMPLFGVHYIVFMATPYTEVSGTLWQVQMHYEMLFNSFQGFFVAIIYCFCNGEVQAEIKKSWSRWTLALDFKRKARSGSSSYSYGPMVSHTSVTNVGPRVGLGLPLSPRLLPTATTNGHPQLPGHAKPGTPALETLETTPPAMAAPKDDGFLNGSCSGLDEEASGPERPPALLQEEWETVM

SEQ ID NO: 230 - DNA, 1664 bp, Homo sapiens
agcccagagacacattggggctgacctgccgctgctgtcagtgggaggccagtggtgctggccaagaagtgtcatggctggtgtcgtgcacgtttccctggctgctcactgcggggcctgtccgtggggccggggcagactccgcaaaggacgcgcagcctgcaagtccgcggcccagagacacattggggctgacctgccgctgctgtcagtgggaggccagtggtgctggccaagaagtgtcatggctggtgtcgtgcacgtttccctggctgctctcctcctgctgcctatggcccctgccatgcattctgactgcatcttcaagaaggagcaagccatgtgcctggagaagatccagagggccaatgagctgatgggcttcaatgattcctctccaggctgtcctgggatgtgggacaacatcacgtgttggaagcccgcccatgtgggtgagatggtcctggtcagctgccctgagctcttccgaatcttcaacccagaccaagtctgggagaccgaaaccattggagagtctgattttggtgacagtaactccttagatctctcagacatgggagtggtgagccggaactgcacggaggatggctggtcggaacccttccctcattactttgatgcctgtgggtttgatgaatatgaatctgagactggggaccaggattattactacctgtcagtgaaggccctctacacggttggctacagcacatccctcgtcaccctcaccactgccatggtcatcctttgtcgcttccggaagctgcactgcacacgcaacttcatccacatgaacctgtttgtgtcgttcatgctgagggcgatctccgtcttcatcaaagactggattctgtatgcggagcaggacagcaaccactgcttcatctccactgtggaatgtaaggccgtcatggttttcttccactactgtgttgtgtccaactacttctggctgttcatcgagggcctgtacctcttcactctgctggtggagaccttcttccctgaaaggagatacttctactggtacaccatcattggctgggggaccccaactgtgtgtgtgacagtgtgggctacgctgagactctactttgatgacacaggctgctgggatatgaatgacagcacagctctgtggtgggtgatcaaaggccctgtggttggctctatcatggttaactttgtgctttttattggcattatcgtcatccttgtgcagaaacttcagtctccagacatgggaggcaatgagtccagcatctacttgcgactggcccggtccaccctgctgctcatcccactattcggaatccactacacagtatttgccttctccccagagaatgtcagcaaaagggaaagactcgtgtttgagctggggctgggctccttccagggctttgtggtggctgttctctactgttttctgaatggtgaggtacaagcggagatcaagcgaaaatggcgaagctggaaggtgaaccgttacttcgctgtggacttcaagcaccgacacccgtctctggccagcagtggggtgaatgggggcacccagctctccatcctgagcaagagcagctcccaaatccgcatgtctggcctccctgctgacaatctggccacctgagccatgctcccct

SEQ ID NO: 231 - protein, 525 aa, Homo sapiens
MAGVVHVSLAAHCGACPWGRGRLRKGRAACKSAAQRHIGADLPLLSVGGQWCWPRSVMAGVVHVSLAALLLLPMAPAMHSDCIFKKEQAMCLEKIQRANELMGFNDSSPGCPGMWDNITCWKPAHVGEMVLVSCPELFRIFNPDQVWETETIGESDFGDSNSLDLSDMGVVSRNCTEDGWSEPFPHYFDACGFDEYESETGDQDYYYLSVKALYTVGYSTSLVTLTTAMVILCRFRKLHCTRNFIHMNLFVSFMLRAISVFIKDWILYAEQDSNHCFISTVECKAVMVFFHYCVVSNYFWLFIEGLYLFTLLVETFFPERRYFYWYTIIGWGTPTVCVTVWATLRLYFDDTGCWDMNDSTALWWVIKGPVVGSIMVNFVLFIGIIVILVQKLQSPDMGGNESSIYLRLARSTLLLIPLFGIHYTVFAFSPENVSKRERLVFELGLGSFQGFVVAVLYCFLNGEVQAEIKRKWRSWKVNRYFAVDFKHRHPSLASSGVNGGTQLSILSKSSSQIRMSGLPADNLAT

SEQ ID NO: 232 - DNA, 1143 bp, Homo sapiens
atggaggaaggtggtgattttgacaactactatggggcagacaaccagtctgagtgtgagtacacagactggaaatcctcgggggccctcatccctgccatctacatgttggtcttcctcctgggcaccacgggaaacggtctggtgctctggaccgtgtttcggagcagccgggagaagaggcgctcagctgatatcttcattgctagcctggcggtggctgacctgaccttcgtggtgacgctgcccctgtgggctacctacacgtaccgggactatgactggccctttgggaccttcttctgcaagctcagcagctacctcatcttcgtcaacatgtacgccagcgtcttctgcctcaccggcctcagcttcgaccgctacctggccatcgtgaggccagtggccaatgctcggctgaggctgcgggtcagcggggccgtggccacggcagttctttgggtgctggccgccctcctggccatgcctgtcatggtgttacgcaccaccggggacttggagaacaccactaaggtgcagtgctacatggactactccatggtggccactgtgagctcagagtgggcctgggaggtgggccttggggtctcgtccaccaccgtgggctttgtggtgcccttcaccatcatgctgacctgttacttcttcatcgcccaaaccatcgctggccacttccgcaaggaacgcatcgagggcctgcggaagcggcgccggctgctcagcatcatcgtggtgctggtggtgacctttgccctgtgctggatgccctaccacctggtgaagacgctgtacatgctgggcagcctgctgcactggccctgtgactttgacctcttcctcatgaacatcttcccctactgcacctgcatcagctacgtcaacagctgcctcaaccccttcctctatgcctttttcgacccccgcttccgccaggcctgcacctccatgctctgctgtggccagagcaggtgcgcaggcacctcccacagcagcagtggggagaagtcagccagctactcttcggggcacagccaggggcccggccccaacatgggcaagggtggagaacagatgcacgagaaatccatcccctacagccaggagacccttgtggttgactag

SEQ ID NO: 233 - protein, 380 aa, Homo sapiens
MEEGGDFDNYYGADNQSECEYTDWKSSGALIPAIYMLVFLLGTTGNGLVLWTVFRSSREKRRSADIFIASLAVADLTFVVTLPLWATYTYRDYDWPFGTFFCKLSSYLIFVNMYASVFCLTGLSFDRYLAIVRPVANARLRLRVSGAVATAVLWVLAALLAMPVMVLRTTGDLENTTKVQCYMDYSMVATVSSEWAWEVGLGVSSTTVGFVVPFTIMLTCYFFIAQTIAGHFRKERIEGLRKRRRLLSIIVVLVVTFALCWMPYHLVKTLYMLGSLLHWPCDFDLFLMNIFPYCTCISYVNSCLNPFLYAFFDPRFRQACTSMLCCGQSRCAGTSHSSSGEKSASYSSGHSQGPGPNMGKGGEQMHEKSIPYSQETLVVD

SEQ ID NO: 234 - DNA, 1900 bp, Homo sapiens
gaattcggcacgagtcagggaagcagccccggcggccagcagggagctcaggacagagcaggctccctgggaagcctccgggtgataggggtgttccagctgcggcgctctgggggttcagagggggatcttgaatgaacaaatgaatgaactgctttctgggcaaacagccacagccagaggagcctgtgattggcagaaagaagccagggtgtgcaagtctccccaacagcctcgagtggcctgcagtcacagggaaccctcaggaagaccttccgggcagagaccagagggaagcccatctctccagcagaactgcttggatttttctaccaggaggctcagggctctgcaacaatgatagcagaagctgatggcatctagagatctaggctgggactagcacagcatcacttctaccactttctgttggtcacagcaactcaccatgccagtgcagattcaaggggaggagaaatagagtccacttcttgatgggaggcgtgacatagaatggaggatgaagattacaacacttccatcagttacggtgatgaataccctgattatttagactccattgtggttttggaggacttatcccccttggaagccagggtgaccaggatcttcctggtggtggtctacagcatcgtctgcttcctcgggattctgggcaatggtctggtgatcatcattgccaccttcaagatgaagaagacagtgaacatggtctggttcctcaacctggcagtggcagatttcctgttcaacgtcttcctcccaatccatatcacctatgccgccatggactaccactgggttttcgggacagccatgtgcaagatcagcaacttccttctcatccacaacatgttcaccagcgtcttcctgctgaccatcatcagctctgaccgctgcatctctgtgctcctccctgtctggtcccagaaccaccgcagcgttcgcctggcttacatggcctgcatggtcatctgggtcctggctttcttcttgagttccccatctctcgtcttccgggacacagccaacctgcatgggaaaatatcctgcttcaacaacttcagcctgtccacacctgggtcttcctcgtggcccactcactcccaaatggaccctgtggggtatagccggcacatggtggtgactgtcacccgcttcctctgtggcttcctggtcccagtcctcatcatcacagcttgctacctcaccatcgtgtgcaaactgcagcgcaaccgcctggccaagaccaagaagcccttcaagattattgtgaccatcatcattaccttcttcctctgctggtgcccctaccacacactcaacctcctagagctccaccacactgccatgcctggctctgtcttcagcctgggtttgcccctggccactgcccttgccattgccaacagctgcatgaaccccattctgtatgttttcatgggtcaggacttcaagaagttcaaggtggccctcttctctcgcctggtcaatgctctaagtgaagatacaggccactcttcctaccccagccatagaagctttaccaagatgtcatcaatgaatgagaggacttctatgaatgagagggagaccggcatgctttgatcctcactgtggaacccctcaatggactctctcaacccagggacacccaaggatatgtcttctgaagatcaaggcaagaacctctttagcatccaccaattttcactgcattttgcatgggatgaacagtgttttatgctgggaatctagggcctggaacccctttcttctagtggacagaacatgctgtgttccatacagccttggactagcaatttatgcttcttgggaggccagccttgactgactcaaagcaaaaaaggaagaattc

SEQ ID NO: 235 - protein, 371 aa, Homo sapiens
MEDEDYNTSISYGDEYPDYLDSIVVLEDLSPLEARVTRIFLVVVYSIVCFLGILGNGLVIIIATFKMKKTVNMVWFLNLAVADFLFNVFLPIHITYAAMDYHWVFGTAMCKISNFLLIHNMFTSVFLLTIISSDRCISVLLPVWSQNHRSVRLAYMACMVIWVLAFFLSSPSLVFRDTANLHGKISCFNNFSLSTPGSSSWPTHSQMDPVGYSRHMVVTVTRFLCGFLVPVLIITACYLTIVCKLQRNRLAKTKKPFKIIVTIIITFFLCWCPYHTLNLLELHHTAMPGSVFSLGLPLATALAIANSCMNPILYVFMGQDFKKFKVALFSRLVNALSEDTGHSSYPSHRSFTKMSSMNERTSMNERETGML

SEQ ID NO: 236 - DNA, 2753 bp, Homo sapiens
gtcgggggcagcagcaagatgcgaagcgagccgtacagatcccgggctctccgaacgcaacttcgccctgcttgagcgaggctgcggtttccgaggccctctccagccaaggaaaagctacacaaaaagcctggatcactcatcgaaccacccctgaagccagtgaaggctctctcgcctcgccctctagcgttcgtctggagtagcgccaccccggcttcctggggacacagggttggcaccatggggcccaccagcgtcccgctggtcaaggcccaccgcagctcggtctctgactacgtcaactatgatatcatcgtccggcattacaactacacgggaaagctgaatatcagcgcggacaaggagaacagcattaaactgacctcggtggtgttcattctcatctgctgctttatcatcctggagaacatctttgtcttgctgaccatttggaaaaccaagaaattccaccgacccatgtactattttattggcaatctggccctctcagacctgttggcaggagtagcctacacagctaacctgctcttgtctggggccaccacctacaagctcactcccgcccagtggtttctgcgggaagggagtatgtttgtggccctgtcagcctccgtgttcagtctcctcgccatcgccattgagcgctatatcacaatgctgaaaatgaaactccacaacgggagcaataacttccgcctcttcctgctaatcagcgcctgctgggtcatctccctcatcctgggtggcctgcctatcatgggctggaactgcatcagtgcgctgtccagctgctccaccgtgctgccgctctaccacaagcactatatcctcttctgcaccacggtcttcactctgcttctgctctccatcgtcattctgtactgcagaatctactccttggtcaggactcggagccgccgcctgacgttccgcaagaacatttccaaggccagccgcagctctgagaagtcgctggcgctgctcaagaccgtaattatcgtcctgagcgtcttcatcgcctgctgggcaccgctcttcatcctgctcctgctggatgtgggctgcaaggtgaagacctgtgacatcctcttcagagcggagtacttcctggtgttagctgtgctcaactccggcaccaaccccatcatttacactctgaccaacaaggagatgcgtcgggccttcatccggatcatgtcctgctgcaagtgcccgagcggagactctgctggcaaattcaagcgacccatcatcgccggcatggaattcagccgcagcaaatcggacaattcctcccacccccagaaagacgaaggggacaacccagagaccattatgtcttctggaaacgtcaactcttcttcctagaactggaagctgtccacccaccggaagcgctctttacttggtcgctggccaccccagtgtttggaaaaaaatctctgggcttcgactgctgccagggaggagctgctgcaagccagagggaggaagggggagaatacgaacagcctggtggtgtcgggtgttggtgggtagagttagttcctgtgaacaatgcactgggaagggtggagatcaggtcccggcctggaatatatattctacccccctggagctttgattttgcactgagccaaaggtctagcattgtcaagctcctaaagggttcatttggcccctcctcaaagactaatgtccccatgtgaaagcgtctctttgtctggagctttgaggagatgttttccttcactttagtttcaaacccaagtgagtgtgtgcacttctgcttctttagggatgccctgtacatcccacaccccaccctcccttcccttcatacccctcctcaacgttcttttactttatactttaactacctgagagttatcagagctggggttgtggaatgatcgatcatctatagcaaataggctatgttgagtacgtaggctgtgggaagatgaagatggtttggaggtgtaaaacaatgtccttcgctgaggccaaagtttccatgtaagcgggatccgttttttggaatttggttgaagtcactttgatttctttaaaaaacatcttttcaatgaaatgtgttaccatttcatatccattgaagccgaaatctgcataaggaagcccactttatctaaatgatattagccaggatccttggtgtcctaggagaaacagacaagcaaaacaaagtgaaaaccgaatggattaacttttgcaaaccaagggagatttcttagcaaatgagtctaacaaatatgacatccgtctttcccacttttgttgatgtttatttcagaatcttgtgtgattcatttcaagcaacaacatgttgtattttgttgtgttaaaagtacttttcttgatttttgaatgtatttgtttcaggaagaagtcattttatggatttttctaacccgtgttaacttttctagaatccaccctcttgtgcccttaagcattactttaactggtagggaacgccagaacttttaagtccagctattcattagatagtaattgaagatatgtataaatattacaaagaataaaaatatattactgtctctttagtatggttttcagtgcaattaaaccgagagatgtcttgtttttttaaaaagaatagtatttaataggtttctgacttttgtggatcattttgcacatagctttatcaacttttaaacattaataaactgatttttttaaag

SEQ ID NO: 237 - protein, 382 aa, Homo sapiens
MGPTSVPLVKAHRSSVSDYVNYDIIVRHYNYTGKLNISADKENSIKLTSVVFILICCFIILENIFVLLTIWKTKKFHRPMYYFIGNLALSDLLAGVAYTANLLLSGATTYKLTPAQWFLREGSMFVALSASVFSLLAIAIERYITMLKMKLHNGSNNFRLFLLISACWVISLILGGLPIMGWNCISALSSCSTVLPLYHKHYILFCTTVFTLLLLSIVILYCRIYSLVRTRSRRLTFRKNISKASRSSEKSLALLKTVIIVLSVFIACWAPLFILLLLDVGCKVKTCDILFRAEYFLVLAVLNSGTNPIIYTLTNKEMRRAFIRIMSCCKCPSGDSAGKFKRPIIAGMEFSRSKSDNSSHPQKDEGDNPETIMSSGNVNSSS

SEQ ID NO: 238 - DNA, 1137 bp, Homo sapiens
atggcaactgccctcccgccgcgtctccagccggtgcgggggaacgagaccctgcgggagcattaccagtacgtggggaagttggcgggcaggctgaaggaggcctccgagggcagcacgctcaccaccgtgctcttcttggtcatctgcagcttcatcgtcttggagaacctgatggttttgattgccatctggaaaaacaataaatttcacaaccgcatgtactttttcattggcaacctggctctctgcgacctgctggccggcatcgcttacaaggtcaacattctgatgtctggcaagaagacgttcagcctgtctcccacggtctggttcctcagggagggcagtatgttcgtggcccttggggcgtccacctgcagcttactggccatcgccatcgagcggcacttgacaatgatcaaaatgaggccttacgacgccaacaagaggcaccgcgtcttcctcctgatcgggatgtgctggctcattgccttcacgctgggcgccctgcccattctgggctggaactgcctgcacaatctccctgactgctctaccatcctgcccctctactccaagaagtacattgccttctgcatcagcatcttcacggccatcctggtgaccatcgtgatcctctacgcacgcatctacttcctggtgaagtccagcagccgtaaggtggccaaccacaacaactcggagcggtccatggcactgctgcggaccgtggtgattgtggtgagcgtgttcatcgcctgctggtccccactcttcatcctcttcctcattgatgtggcctgcagggtgcaggcgtgccccatcctcttcaaggctcagtggttcatcgtgttggctgtgctcaactccgccatgaacccggtcatctacacgctggccagcaaggagatgcggcgggccttcttccgtctggtctgcaactgcctggtcaggggacggggggcccgcgcctcacccatccagcctgcgctcgacccaagcagaagtaaatcaagcagcagcaacaatagcagccactctccgaaggtcaaggaagacctgccccacacagacccctcatcctgcatcatggacaagaacgcagcacttcagaatgggatcttctgcaactga

SEQ ID NO: 239 - protein, 378 aa, Homo sapiens
MATALPPRLQPVRGNETLREHYQYVGKLAGRLKEASEGSTLTTVLFLVICSFIVLENLMVLIAIWKNNKFHNRMYFFIGNLALCDLLAGIAYKVNILMSGKKTFSLSPTVWFLREGSMFVALGASTCSLLAIAIERHLTMIKMRPYDANKRHRVFLLIGMCWLIAFTLGALPILGWNCLHNLPDCSTILPLYSKKYIAFCISIFTAILVTIVILYARIYFLVKSSSRKVANHNNSERSMALLRTVVIVVSVFIACWSPLFILFLIDVACRVQACPILFKAQWFIVLAVLNSAMNPVIYTLASKEMRRAFFRLVCNCLVRGRGARASPIQPALDPSRSKSSSSNNSSHSPKVKEDLPHTDPSSCIMDKNAALQNGIFCN

SEQ ID NO: 240 - DNA, 2462 bp, Homo sapiens
gcccctcatcccaggcagagagcaacccagctctttccccagacactgagagctggtggtgcctgctgtcccagggagagttgcatcgccctccacaagccctattcctaacatggctgatgactatggctctgaatccacatcttccatggaagactacgttaacttcaacttcactgacttctactgtgagaaaaacaatgtcaggcagtttgcgagccatttcctcccacccttgtactggctcgtgttcatcgtgggtgccttgggcaacagtcttgttatccttgtctactggtactgcacaagagtgaagaccatgaccgacatgttccttttgaatttggcaattgctgacctcctctttcttgtcactcttcccttctgggccattgctgctgctgaccagtggaagttccagaccttcatgtgcaaggtggtcaacagcatgtacaagatgaacttctacagctgtgtgttgctgatcatgtgcatcagcgtggacaggtacattgccattgcccaggccatgagagcacatacttggagggagaaaaggcttttgtacagcaaaatggtttgctttaccatctgggtattggcagctgctctctgcatcccagaaatcttatacagccaaatcaaggaggaatccggcattgctatctgcaccatggtttaccctagcgatgagagcaccaaactgaagtcagctgtcttgaccctgaaggtcattctggggttcttccttcccttcgtggtcatggcttgctgctataccatcatcattcacaccctgatacaagccaagaagtcttccaagcacaaagccctaaaagtgaccatcactgtcctgaccgtctttgtcttgtctcagtttccctacaactgcattttgttggtgcagaccattgacgcctatgccatgttcatctccaactgtgccgtttccaccaacattgacatctgcttccaggtcacccagaccatcgccttcttccacagttgcctgaaccctgttctctatgtttttgtgggtgagagattccgccgggatctcgtgaaaaccctgaagaacttgggttgcatcagccaggcccagtgggtttcatttacaaggagagagggaagcttgaagctgtcgtctatgttgctggagacaacctcaggagcactctccctctgaggggtcttctctgaggtgcatggttcttttggaagaaatgagaaatacagaaacagtttccccactgatgggaccagagagagtgaaagagaaaagaaaactcagaaagggatgaatctgaactatatgattacttgtagtcagaatttgccaaagcaaatatttcaaaatcaactgactagtgcaggaggctgttgattggctcttgactgtgatgcccgcaattctcaaaggaggactaaggaccggcactgtggagcaccctggctttgccactcgccggagcatcaatgccgctgcctctggaggagcccttggattttctccatgcactgtgaacttctgtggcttcagttctcatgctgcctcttccaaaaggggacacagaagcactggctgctgctacagaccgcaaaagcagaaagtttcgtgaaaatgtccatctttgggaaattttctaccctgctcttgagcctgataacccatgccaggtcttatagattcctgatctagaacctttccaggcaatctcagacctaatttccttctgttctccttgttctgttctgggccagtgaaggtccttgttctgattttgaaacgatctgcaggtcttgccagtgaacccctggacaactgaccacacccacaaggcatccaaagtctgttggcttccaatccatttctgtgtcctgctggaggttttaacctagacaaggattccgcttattccttggtatggtgacagtgtctctccatggcctgagcagggagattataacagctgggttcgcaggagccagccttggccctgttgtaggcttgttctgttgagtggcacttgctttgggtccaccgtctgtctgctccctagaaaatgggctggttcttttggccctcttctttctgaggcccactttattctgaggaatacagtgagcagatatgggcagcagccaggtagggcaaaggggtgaagcgcaggccttgctggaaggctatttacttccatgcttctccttttcttactctatagtggcaacattttaaaagcttttaacttagagattaggctgaaaaaaataagtaatggaattcacctttgcatcttttgtgtctttcttatcatgatttggcaaaatgcatcacctttgaaaatatttcacatattggaaaagtgctttttaatgtgtatatgaagcattaattacttgtcactttctttaccctgtctcaatattttaagtgtgtgcaattaaagatcaaatagatacat

SEQ ID NO: 241 - protein, 357 aa, Homo sapiens
MADDYGSESTSSMEDYVNFNFTDFYCEKNNVRQFASHFLPPLYWLVFIVGALGNSLVILVYWYCTRVKTMTDMFLLNLAIADLLFLVTLPFWAIAAADQWKFQTFMCKVVNSMYKMNFYSCVLLIMCISVDRYIAIAQAMRAHTWREKRLLYSKMVCFTIWVLAAALCIPEILYSQIKEESGIAICTMVYPSDESTKLKSAVLTLKVILGFFLPFVVMACCYTIIIHTLIQAKKSSKHKALKVTITVLTVFVLSQFPYNCILLVQTIDAYAMFISNCAVSTNIDICFQVTQTIAFFHSCLNPVLYVFVGERFRRDLVKTLKNLGCISQAQWVSFTRREGSLKLSSMLLETTSGALSL

SEQ ID NO: 242 - DNA, 1068 bp, Homo sapiens
atggaagatttggaggaaacattatttgaagaatttgaaaactattcctatgacctagactattactctctggagtctgatttggaggagaaagtccagctgggagttgttcactgggtctccctggtgttatattgtttggcttttgttctgggaattccaggaaatgccatcgtcatttggttcacggggctcaagtggaagaagacagtcaccactctgtggttcctcaatctagccattgcggatttcatttttcttctctttctgcccctgtacatctcctatgtggccatgaatttccactggccctttggcatctggctgtgcaaagccaattccttcactgcccagttgaacatgtttgccagtgtttttttcctgacagtgatcagcctggaccactatatccacttgatccatcctgtcttatctcatcggcatcgaaccctcaagaactctctgattgtcattatattcatctggcttttggcttctctaattggcggtcctgccctgtacttccgggacactgtggagttcaataatcatactctttgctataacaattttcagaagcatgatcctgacctcactttgatcaggcaccatgttctgacttgggtgaaatttatcattggctatctcttccctttgctaacaatgagtatttgctacttgtgtctcatcttcaaggtgaagaagcgaacagtcctgatctccagtaggcatttctggacaattctggttgtggttgtggcctttgtggtttgctggactccttatcacctgtttagcatttgggagctcaccattcaccacaatagctattcccaccatgtgatgcaggctggaatccccctctccactggtttggcattcctcaatagttgcttgaaccccatcctttatgtcctaattagtaagaagttccaagctcgcttccggtcctcagttgctgagatactcaagtacacactgtgggaagtcagctgttctggcacagtgagtgaacagctcaggaactcagaaaccaagaatctgtgtctcctggaaacagctcaataa

SEQ ID NO: 243 - protein, 355 aa, Homo sapiens
MEDLEETLFEEFENYSYDLDYYSLESDLEEKVQLGVVHWVSLVLYCLAFVLGIPGNAIVIWFTGLKWKKTVTTLWFLNLAIADFIFLLFLPLYISYVAMNFHWPFGIWLCKANSFTAQLNMFASVFFLTVISLDHYIHLIHPVLSHRHRTLKNSLIVIIFIWLLASLIGGPALYFRDTVEFNNHTLCYNNFQKHDPDLTLIRHHVLTWVKFIIGYLFPLLTMSICYLCLIFKVKKRTVLISSRHFWTILVVVVAFVVCWTPYHLFSIWELTIHHNSYSHHVMQAGIPLSTGLAFLNSCLNPILYVLISKKFQARFRSSVAEILKYTLWEVSCSGTVSEQLRNSETKNLCLLETAQ

SEQ ID NO: 244 - DNA, 1113 bp, Homo sapiens
atggcctcatcgaccactcggggccccagggtttctgacttattttctgggctgccgccggcggtcacaactcccgccaaccagagcgcagaggcctcggcgggcaacgggtcggtggctggcgcggacgctccagccgtcacgcccttccagagcctgcagctggtgcatcagctgaaggggctgatcgtgctgctctacagcgtcgtggtggtcgtggggctggtgggcaactgcctgctggtgctggtgatcgcgcgggtgcgccggctgcacaacgtgacgaacttcctcatcggcaacctggccttgtccgacgtgctcatgtgcaccgcctgcgtgccgctcacgctggcctatgccttcgagccacgcggctgggtgttcggcggcggcctgtgccacctggtcttcttcctgcagccggtcaccgtctatgtgtcggtgttcacgctcaccaccatcgcagtggaccgctacgtcgtgctggtgcacccgctgaggcggcgcatctcgctgcgcctcagcgcctacgctgtgctggccatctgggcgctgtccgcggtgctggcgctgcccgccgccgtgcacacctatcacgtggagctcaagccgcacgacgtgcgcctctgcgaggagttctggggctcccaggagcgccagcgccagctctacgcctgggggctgctgctggtcacctacctgctccctctgctggtcatcctcctgtcttacgtccgggtgtcagtgaagctccgcaaccgcgtggtgccgggctgcgtgacccagagccaggccgactgggaccgcgctcggcgccggcgcaccttctgcttgctggtggtggtcgtggtggtgttcgccgtctgctggctgccgctgcacgtcttcaacctgctgcgggacctcgacccccacgccatcgacccttacgcctttgggctggtgcagctgctctgccactggctcgccatgagttcggcctgctacaaccccttcatctacgcctggctgcacgacagcttccgcgaggagctgcgcaaactgttggtcgcttggccccgcaagatagccccccatggccagaatatgaccgtcagcgtggtcatctga

SEQ ID NO: 245 - protein, 370 aa, Homo sapiens
MASSTTRGPRVSDLFSGLPPAVTTPANQSAEASAGNGSVAGADAPAVTPFQSLQLVHQLKGLIVLLYSVVVVVGLVGNCLLVLVIARVRRLHNVTNFLIGNLALSDVLMCTACVPLTLAYAFEPRGWVFGGGLCHLVFFLQPVTVYVSVFTLTTIAVDRYVVLVHPLRRRISLRLSAYAVLAIWALSAVLALPAAVHTYHVELKPHDVRLCEEFWGSQERQRQLYAWGLLLVTYLLPLLVILLSYVRVSVKLRNRVVPGCVTQSQADWDRARRRRTFCLLVVVVVVFAVCWLPLHVFNLLRDLDPHAIDPYAFGLVQLLCHWLAMSSACYNPFIYAWLHDSFREELRKLLVAWPRKIAPHGQNMTVSVVI

SEQ ID NO: 246 - DNA, 1005 bp, Homo sapiens
atgaatgaagacctgaaggtcaatttaagcgggctgcctcgggattatttagatgccgctgctgcggagaacatctcggctgctgtctcctcccgggttcctgccgtagagccagagcctgagctcgtagtcaacccctgggacattgtcttgtgtacctcgggaaccctcatctcctgtgaaaatgccattgtggtccttatcatcttccacaaccccagcctgcgagcacccatgttcctgctaataggcagcctggctcttgcagacctgctggccggcattggactcatcaccaattttgtttttgcctacctgcttcagtcagaagccaccaagctggtcacgatcggcctcattgtcgcctctttctctgcctctgtctgcagcttgctggctatcactgttgaccgctacctctcactgtactacgctctgacgtaccattcggagaggacggtcacgtttacctatgtcatgctcgtcatgctctgggggacctccatctgcctggggctgctgcccgtcatgggctggaactgcctccgagacgagtccacctgcagcgtggtcagaccgctcaccaagaacaacgcggccatcctctcggtgtccttcctcttcatgtttgcgctcatgcttcagctctacatccagatctgtaagattgtgatgaggcacgcccatcagatagccctgcagcaccacttcctggccacgtcgcactatgtgaccacccggaaaggggtctccaccctggctatcatcctggggacgtttgctgcttgctggatgcctttcaccctctattccttgatagcggattacacctacccctccatctatacctacgccaccctcctgcccgccacctacaattccatcatcaaccctgtcatatatgctttcagaaaccaagagatccagaaagcgctctgtctcatttgctgcggctgcatcccgtccagtctcgcccagagagcgcgctcgcccagtgatgtgtag

SEQ ID NO: 247 - protein, 334 aa, Homo sapiens
MNEDLKVNLSGLPRDYLDAAAAENISAAVSSRVPAVEPEPELVVNPWDIVLCTSGTLISCENAIVVLIIFHNPSLRAPMFLLIGSLALADLLAGIGLITNFVFAYLLQSEATKLVTIGLIVASFSASVCSLLAITVDRYLSLYYALTYHSERTVTFTYVMLVMLWGTSICLGLLPVMGWNCLRDESTCSVVRPLTKNNAAILSVSFLFMFALMLQLYIQICKIVMRHAHQIALQHHFLATSHYVTTRKGVSTLAIILGTFAACWMPFTLYSLIADYTYPSIYTYATLLPATYNSIINPVIYAFRNQEIQKALCLICCGCIPSSLAQRARSPSDV

SEQ ID NO: 248 - DNA, 1487 bp, Homo sapiens
ggggcagatccagattccctttgcagtccacgccaggccttcaccatggatcagttccctgaatcagtgacagaaaactttgagtacgatgatttggctgaggcctgttatattggggacatcgtggtctttgggactgtgttcctgtccatattctactccgtcatctttgccattggcctggtgggaaatttgttggtagtgtttgccctcaccaacagcaagaagcccaagagtgtcaccgacatttacctcctgaacctggccttgtctgatctgctgtttgtagccactttgcccttctggactcactatttgataaatgaaaagggcctccacaatgccatgtgcaaattcactaccgccttcttcttcatcggcttttttggaagcatattcttcatcaccgtcatcagcattgataggtacctggccatcgtcctggccgccaactccatgaacaaccggaccgtgcagcatggcgtcaccatcagcctaggcgtctgggcagcagccattttggtggcagcaccccagttcatgttcacaaagcagaaagaaaatgaatgccttggtgactaccccgaggtccttcaggaaatctggcccgtgctccgcaatgtggaaacaaattttcttggcttcctactccccctgctcattatgagttattgctacttcagaatcatccagacgctgttttcctgcaagaaccacaagaaagccaaagccattaaactgatccttctggtggtcatcgtgtttttcctcttctggacaccctacaacgttatgattttcctggagacgcttaagctctatgacttctttcccagttgtgacatgaggaaggatctgaggctggccctcagtgtgactgagacggttgcatttagccattgttgcctgaatcctctcatctatgcatttgctggggagaagttcagaagatacctttaccacctgtatgggaaatgcctggctgtcctgtgtgggcgctcagtccacgttgatttctcctcatctgaatcacaaaggagcaggcatggaagtgttctgagcagcaattttacttaccacacgagtgatggagatgcattgctccttctctgaagggaatcccaaagccttgtgtctacagagaacctggagttcctgaacctgatgctgactagtgaggaagatttttgttgttatttcttacaggcacaaaatgatggacccaatgcacacaaaacaaccctagagtgttgttgagaattgtgctcaaaatttgaagaatgaacaaattgaactctttgaatgacaaagagtagacatttctcttactgcaaatgtcatcagaactttttggtttgcagatgacaaaaattcaactcagactagtttagttaaatgagggtggtgaatattgttcatattgtggcacaagcaaaaagggtgtctgagccctcaaagtgaggggaaccagggcctgagccaagcta

SEQ ID NO: 249 - protein, 355 aa, Homo sapiens
MDQFPESVTENFEYDDLAEACYIGDIVVFGTVFLSIFYSVIFAIGLVGNLLVVFALTNSKKPKSVTDIYLLNLALSDLLFVATLPFWTHYLINEKGLHNAMCKFTTAFFFIGFFGSIFFITVISIDRYLAIVLAANSMNNRTVQHGVTISLGVWAAAILVAAPQFMFTKQKENECLGDYPEVLQEIWPVLRNVETNFLGFLLPLLIMSYCYFRIIQTLFSCKNHKKAKAIKLILLVVIVFFLFWTPYNVMIFLETLKLYDFFPSCDMRKDLRLALSVTETVAFSHCCLNPLIYAFAGEKFRRYLYHLYGKCLAVLCGRSVHVDFSSSESQRSRHGSVLSSNFTYHTSDGDALLLL

SEQ ID NO: 250 - DNA, 1083 bp, Homo sapiens
atggacccagaagaaacttcagtttatttggattattactatgctacgagcccaaactctgacatcagggagacccactcccatgttccttacacctctgtcttccttccagtcttttacacagctgtgttcctgactggagtgctggggaaccttgttctcatgggagcgttgcatttcaaacccggcagccgaagactgatcgacatctttatcatcaatctggctgcctctgacttcatttttcttgtcacattgcctctctgggtggataaagaagcatctctaggactgtggaggacgggctccttcctgtgcaaagggagctcctacatgatctccgtcaatatgcactgcagtgtcctcctgctcacttgcatgagtgttgaccgctacctggccattgtgtggccagtcgtatccaggaaattcagaaggacagactgtgcatatgtagtctgtgccagcatctggtttatctcctgcctgctggggttgcctactcttctgtccagggagctcacgctgattgatgataagccatactgtgcagagaaaaaggcaactccaattaaactcatatggtccctggtggccttaattttcaccttttttgtccctttgttgagcattgtgacctgctactgttgcattgcaaggaagctgtgtgcccattaccagcaatcaggaaagcacaacaaaaagctgaagaaatctataaagatcatctttattgtcgtggcagcctttcttgtctcctggctgcccttcaatactttcaagttcctggccattgtctctgggttgcggcaagaacactatttaccctcagctattcttcagcttggtatggaggtgagtggacccttggcatttgccaacagctgtgtcaaccctttcatttactatatcttcgacagctacatccgccgggccattgtccactgcttgtgcccttgcctgaaaaactatgactttgggagtagcactgagacatcagatagtcacctcactaaggctctctccaccttcattcatgcagaagattttgccaggaggaggaagaggtctgtgtcactctaa

SEQ ID NO: 251 - protein, 360 aa, Homo sapiens
MDPEETSVYLDYYYATSPNSDIRETHSHVPYTSVFLPVFYTAVFLTGVLGNLVLMGALHFKPGSRRLIDIFIINLAASDFIFLVTLPLWVDKEASLGLWRTGSFLCKGSSYMISVNMHCSVLLLTCMSVDRYLAIVWPVVSRKFRRTDCAYVVCASIWFISCLLGLPTLLSRELTLIDDKPYCAEKKATPIKLIWSLVALIFTFFVPLLSIVTCYCCIARKLCAHYQQSGKHNKKLKKSIKIIFIVVAAFLVSWLPFNTFKFLAIVSGLRQEHYLPSAILQLGMEVSGPLAFANSCVNPFIYYIFDSYIRRAIVHCLCPCLKNYDFGSSTETSDSHLTKALSTFIHAEDFARRRKRSVSL

SEQ ID NO: 252 - DNA, 1409 bp, Homo sapiens
gaaagagacaaagcagcaattaaagtcagcccagcaccaactccgacgccaagcgttacactggaaactactttttaaagcaacaaaagagtctaaaacaaaatacaacatttcttaaatacactgtttccagaaagagctattttaacagaagcaactcaaagatatcccttcgacagaagtggaagtgctgaaaaatgctcatctctcacacagacttttgatggacaggagtttctaagtatcatgcctaccaacaagctgtaaaatgatcaccctgaacaatcaagatcaacctgtcccttttaacagctcacatccagatgaatacaaaattgcagcccttgtcttctatagctgtatcttcataattggattatttgttaacatcactgcattatgggttttcagttgtaccaccaagaagagaaccacggtaaccatctatatgatgaatgtggcattagtggacttgatatttataatgactttaccctttcgaatgttttattatgcaaaagatgaatggccatttggagagtacttctgccagattcttggagctctcacagtgttttacccaagcattgctttatggcttcttgcctttattagtgctgacagatacatggccattgtacagccgaagtacgccaaagaacttaaaaacacgtgcaaagccgtgctggcgtgtgtgggagtctggataatgaccctgaccacgaccacccctctgctactgctctataaagacccagataaagactccactcccgccacctgcctcaagatttctgacatcatctatctaaaagctgtgaacgtgctgaacctcactcgactgacattttttttcttgattcctttgttcatcatgattgggtgctacttggtcattattcataatctccttcacggcaggacgtctaagctgaaacccaaagtcaaggagaagtccataaggatcatcatcacgctgctggtgcaggtgctcgtctgctttatgcccttccacatctgtttcgctttcctgatgctgggaacgggggagaacagttacaatccctggggagcctttaccaccttcctcatgaacctcagcacgtgtctggatgtgattctctactacatcgtttcaaaacaatttcaggctcgagtcattagtgtcatgctataccgtaattaccttcgaagcatgcgcagaaaaagtttccgatctggtagtctacggtcactaagcaatataaacagtgaaatgttatgaataataaggttctttcatttcaatcccatcaaaattcacttcactaactactctggcgtcaatggatattctgtataatactatcaagtcccttttctcttgaaaaaataaattcattatcttcattttaaaaaaaaaaaaaaaa

SEQ ID NO: 253 - protein, 331 aa, Homo sapiens
MITLNNQDQPVPFNSSHPDEYKIAALVFYSCIFIIGLFVNITALWVFSCTTKKRTTVTIYMMNVALVDLIFIMTLPFRMFYYAKDEWPFGEYFCQILGALTVFYPSIALWLLAFISADRYMAIVQPKYAKELKNTCKAVLACVGVWIMTLTTTTPLLLLYKDPDKDSTPATCLKISDIIYLKAVNVLNLTRLTFFFLIPLFIMIGCYLVIIHNLLHGRTSKLKPKVKEKSIRIIITLLVQVLVCFMPFHICFAFLMLGTGENSYNPWGAFTTFLMNLSTCLDVILYYIVSKQFQARVISVMLYRNYLRSMRRKSFRSGSLRSLSNINSEML

SEQ ID NO: 254 - DNA, 1409 bp, Homo sapiens
aattaagagaaaaaaagtgaatatggtttttgctcacagaatggataacagcaagccacatttgattattcctacacttctggtgcccctccaaaaccgcagctgcactgaaacagccacacctctgccaagccaatacctgatggaattaagtgaggagcacagttggatgagcaaccaaacagaccttcactatgtgctgaaacccggggaagtggccacagccagcatcttctttgggattctgtggttgttttctatcttcggcaattccctggtttgtttggtcatccataggagtaggaggactcagtctaccaccaactactttgtggtctccatggcatgtgctgaccttctcatcagcgttgccagcacgcctttcgtcctgctccagttcaccactggaaggtggacgctgggtagtgcaacgtgcaaggttgtgcgatattttcaatatctcactccaggtgtccagatctacgttctcctctccatctgcatagaccggttctacaccatcgtctatcctctgagcttcaaggtgtccagagaaaaagccaagaaaatgattgcggcatcgtggatctttgatgcaggctttgtgacccctgtgctctttttctatggctccaactgggacagtcattgtaactatttcctcccctcctcttgggaaggcactgcctacactgtcatccacttcttggtgggctttgtgattccatctgtcctcataattttattttaccaaaaggtcataaaatatatttggagaataggcacagatggccgaacggtgaggaggacaatgaacattgtccctcggacaaaagtgaaaactatcaagatgttcctcattttaaatctgttgtttttgctctcctggctgccttttcatgtagctcagctatggcacccccatgaacaagactataagaaaagttcccttgttttcacagctatcacatggatatcctttagttcttcagcctctaaacctactctgtattcaatttataatgccaattttcggagagggatgaaagagactttttgcatgtcctctatgaaatgttaccgaagcaatgcctatactatcacaacaagttcaaggatggccaaaaaaaactacgttggcatttcagaaatcccttccatggccaaaactattaccaaagactcgatctatgactcatttgacagagaagccaaggaaaaaaagcttgcttggcccattaactcaaatccaccaaatacttttgtctaagttctcattctttcaattgttatgcaccagagattaaaaagctttaactataaaaacagaagctatttacatatttgttttcactcaactttccaagggaaatgttttattttgtaaaatgcattcatttgtttactgt

SEQ ID NO: 255 - protein, 415 aa, Homo sapiens
MVFAHRMDNSKPHLIIPTLLVPLQNRSCTETATPLPSQYLMELSEEHSWMSNQTDLHYVLKPGEVATASIFFGILWLFSIFGNSLVCLVIHRSRRTQSTTNYFVVSMACADLLISVASTPFVLLQFTTGRWTLGSATCKVVRYFQYLTPGVQIYVLLSICIDRFYTIVYPLSFKVSREKAKKMIAASWIFDAGFVTPVLFFYGSNWDSHCNYFLPSSWEGTAYTVIHFLVGFVIPSVLIILFYQKVIKYIWRIGTDGRTVRRTMNIVPRTKVKTIKMFLILNLLFLLSWLPFHVAQLWHPHEQDYKKSSLVFTAITWISFSSSASKPTLYSIYNANFRRGMKETFCMSSMKCYRSNAYTITTSSRMAKKNYVGISEIPSMAKTITKDSIYDSFDREAKEKKLAWPINSNPPNTFV

SEQ ID NO: 256 - DNA, 1244 bp, Homo sapiens
agagatggggacggaggccacagagcaggtttcctggggccattactctggggatgaagaggacgcatactcggctgagccactgccggagctttgctacaaggccgatgtccaggccttcagccgggccttccaacccagtgtctccctgaccgtggctgcgctgggtctggccggcaatggcctggtcctggccacccacctggcagcccgacgcgcagcgcgctcgcccacctctgcccacctgctccagctggccctggccgacctcttgctggccctgactctgcccttcgcggcagcaggggctcttcagggctggagtctgggaagtgccacctgccgcaccatctctggcctctactcggcctccttccacgccggcttcctcttcctggcctgtatcagcgccgaccgctacgtggccatcgcgcgagcgctcccagccgggccgcggccctccactcccggccgcgcacacttggtctccgtcatcgtgtggctgctgtcactgctcctggcgctgcctgcgctgctcttcagccaggatgggcagcgggaaggccaacgacgctgtcgcctcatcttccccgagggcctcacgcagacggtgaagggggcgagcgccgtggcgcaggtggccctgggcttcgcgctgccgctgggcgtcatggtagcctgctacgcgcttctgggccgcacgctgctggccgccagggggcccgagcgccggcgtgcgctgcgcgtcgtggtggctctggtggcggccttcgtggtgctgcagctgccctacagcctcgccctgctgctggatactgccgatctactggctgcgcgcgagcggagctgccctgccagcaaacgcaaggatgtcgcactgctggtgaccagcggcttggccctcgcccgctgtggcctcaatcccgttctctacgccttcctgggcctgcgcttccgccaggacctgcggaggctgctacggggtgggagctcgccctcagggcctcaaccccgccgcggctgcccccgccggccccgcctttcttcctgctcagctcccacggagacccacagtctctcctgggacaactagggctgcgaatctagaggagggggcaggctgagggtcgtgggaaaggggagtaggtgggggaacactgagaaagaggcagggacctaaagggactacctctgtgccttgccacattaaattgataacatggaaatgaaaaaaaaaaaaaaaa

SEQ ID NO: 257 - protein, 362 aa, Homo sapiens
MGTEATEQVSWGHYSGDEEDAYSAEPLPELCYKADVQAFSRAFQPSVSLTVAALGLAGNGLVLATHLAARRAARSPTSAHLLQLALADLLLALTLPFAAAGALQGWSLGSATCRTISGLYSASFHAGFLFLACISADRYVAIARALPAGPRPSTPGRAHLVSVIVWLLSLLLALPALLFSQDGQREGQRRCRLIFPEGLTQTVKGASAVAQVALGFALPLGVMVACYALLGRTLLAARGPERRRALRVVVALVAAFVVLQLPYSLALLLDTADLLAARERSCPASKRKDVALLVTSGLALARCGLNPVLYAFLGLRFRQDLRRLLRGGSSPSGPQPRRGCPRRPRLSSCSAPTETHSLSWDN

SEQ ID NO: 258 - DNA, 1077 bp, Homo sapiens
atgccctctgtgtctccagcggggccctcggccggggcagtccccaatgccaccgcagtgacaacagtgcggaccaatgccagcgggctggaggtgcccctgttccacctgtttgcccggctggacgaggagctgcatggcaccttcccaggcctgtgcgtggcgctgatggcggtgcacggagccatcttcctggcagggctggtgctcaacgggctggcgctgtacgtcttctgctgccgcacccgggccaagacaccctcagtcatctacaccatcaacctggtggtgaccgatctactggtagggctgtccctgcccacgcgcttcgctgtgtactacggcgccaggggctgcctgcgctgtgccttcccgcacgtcctcggttacttcctcaacatgcactgctccatcctcttcctcacctgcatctgcgtggaccgctacctggccatcgtgcggcccgaagctcccgccgcctgccgccagcctgcctgtgccagggccgtgtgcgccttcgtgtggctggccgccggtgccgtcaccctgtcggtgctgggcgtgacaggcagccggccctgctgccgtgtctttgcgctgactgtcctggagttcctgctgcccctgctggtcatcagcgtgtttaccggccgcatcatgtgtgcactgtcgcggccgggtctgctccaccagggtcgccagcgccgcgtgcgggccatgcagctcctgctcacggtgctcatcatctttctcgtctgcttcacgcccttccacgcccgccaagtggccgtggcgctgtggcccgacatgccacaccacacgagcctcgtggtctaccacgtggccgtgaccctcagcagcctcaacagctgcatggaccccatcgtctactgcttcgtcaccagtggcttccaggccaccgtccgaggcctcttcggccagcacggagagcgtgagcccagcagcggtgacgtggtcagcatgcacaggagctccaagggctcaggccgtcatcacatcctcagtgccggccctcacgccctcacccaggccctggctaatgggcccgaggcttag

SEQ ID NO: 259 - protein, 358 aa, Homo sapiens
MPSVSPAGPSAGAVPNATAVTTVRTNASGLEVPLFHLFARLDEELHGTFPGLCVALMAVHGAIFLAGLVLNGLALYVFCCRTRAKTPSVIYTINLVVTDLLVGLSLPTRFAVYYGARGCLRCAFPHVLGYFLNMHCSILFLTCICVDRYLAIVRPEAPAACRQPACARAVCAFVWLAAGAVTLSVLGVTGSRPCCRVFALTVLEFLLPLLVISVFTGRIMCALSRPGLLHQGRQRRVRAMQLLLTVLIIFLVCFTPFHARQVAVALWPDMPHHTSLVVYHVAVTLSSLNSCMDPIVYCFVTSGFQATVRGLFGQHGEREPSSGDVVSMHRSSKGSGRHHILSAGPHALTQALANGPEA

SEQ ID NO: 260 - DNA, 1050 bp, Homo sapiens
atgaactccaccttggatggtaatcagagcagccaccctttttgcctcttggcatttggctatttggaaactgtcaatttttgccttttggaagtattgattattgtctttctaactgtattgattatttctggcaacatcattgtgatttttgtatttcactgtgcacctttgttgaaccatcacactacaagttattttatccagactatggcatatgctgacctttttgttggggtgagctgcgtggtcccttctttatcactcctccatcacccccttccagtagaggagtccttgacttgccagatatttggttttgtagtatcagttctgaagagcgtctccatggcttctctggcctgtatcagcattgatagatacattgccattactaaacctttaacctataatactctggttacaccctggagactacgcctgtgtattttcctgatttggctatactcgaccctggtcttcctgccttcctttttccactggggcaaacctggatatcatggagatgtgtttcagtggtgtgcggagtcctggcacaccgactcctacttcaccctgttcatcgtgatgatgttatatgccccagcagcccttattgtctgcttcacctatttcaacatcttccgcatctgccaacagcacacaaaggatatcagcgaaaggcaagcccgcttcagcagccagagtggggagactggggaagtgcaggcctgtcctgataagcgctatgccatggtcctgtttcgaatcactagtgtattttacatcctctggttgccatatatcatctacttcttgttggaaagctccactggccacagcaaccgcttcgcatccttcttgaccacctggcttgctattagtaacagtttctgcaactgtgtaatttatagtctctccaacagtgtattccaaagaggactaaagcgcctctcaggggctatgtgtacttcttgtgcaagtcagactacagccaacgacccttacacagttagaagcaaaggccctcttaatggatgtcatatctga

SEQ ID NO: 261 - protein, 349 aa, Homo sapiens
MNSTLDGNQSSHPFCLLAFGYLETVNFCLLEVLIIVFLTVLIISGNIIVIFVFHCAPLLNHHTTSYFIQTMAYADLFVGVSCVVPSLSLLHHPLPVEESLTCQIFGFVVSVLKSVSMASLACISIDRYIAITKPLTYNTLVTPWRLRLCIFLIWLYSTLVFLPSFFHWGKPGYHGDVFQWCAESWHTDSYFTLFIVMMLYAPAALIVCFTYFNIFRICQQHTKDISERQARFSSQSGETGEVQACPDKRYAMVLFRITSVFYILWLPYIIYFLLESSTGHSNRFASFLTTWLAISNSFCNCVIYSLSNSVFQRGLKRLSGAMCTSCASQTTANDPYTVRSKGPLNGCHI

SEQ ID NO: 262 - DNA, 1302 bp, Homo sapiens
atgtgtttttctcccattctggaaatcaacatgcagtctgaatctaacattacagtgcgagatgacattgatgacatcaacaccaatatgtaccaaccactatcatatccgttaagctttcaagtgtctctcaccggatttcttatgttagaaattgtgttgggacttggcagcaacctcactgtattggtactttactgcatgaaatccaacttaatcaactctgtcagtaacattattacaatgaatcttcatgtacttgatgtaataatttgtgtgggatgtattcctctaactatagttatccttctgctttcactggagagtaacactgctctcatttgctgtttccatgaggcttgtgtatcttttgcaagtgtctcaacagcaatcaacgtttttgctatcactttggacagatatgacatctctgtaaaacctgcaaaccgaattctgacaatgggcagagctgtaatgttaatgatatccatttggattttttcttttttctctttcctgattccttttattgaggtaaattttttcagtcttcaaagtggaaatacctgggaaaacaagacacttttatgtgtcagtacaaatgaatactacactgaactgggaatgtattatcacctgttagtacagatcccaatattctttttcactgttgtagtaatgttaatcacatacaccaaaatacttcaggctcttaatattcgaataggcacaagattttcaacagggcagaagaagaaagcaagaaagaaaaagacaatttctctaaccacacaacatgaggctacagacatgtcacaaagcagtggtgggagaaatgtagtctttggtgtaagaacttcagtttctgtaataattgccctccggcgagctgtgaaacgacaccgtgaacgacgagaaagacaaaagagagtcttcaggatgtctttattgattatttctacatttcttctctgctggacaccaatttctgttttaaataccaccattttatgtttaggcccaagtgaccttttagtaaaattaagattgtgttttttagtcatggcttatggaacaactatatttcaccctctattatatgcattcactagacaaaaatttcaaaaggtcttgaaaagtaaaatgaaaaagcgagttgtttctatagtagaagctgatcccctgcctaataatgctgtaatacacaactcttggatagatcccaaaagaaacaaaaaaattacctttgaagatagtgaaataagagaaaaacgtttagtgcctcaggttgtcacagactag

SEQ ID NO: 263 - protein, 433 aa, Homo sapiens
MCFSPILEINMQSESNITVRDDIDDINTNMYQPLSYPLSFQVSLTGFLMLEIVLGLGSNLTVLVLYCMKSNLINSVSNIITMNLHVLDVIICVGCIPLTIVILLLSLESNTALICCFHEACVSFASVSTAINVFAITLDRYDISVKPANRILTMGRAVMLMISIWIFSFFSFLIPFIEVNFFSLQSGNTWENKTLLCVSTNEYYTELGMYYHLLVQIPIFFFTVVVMLITYTKILQALNIRIGTRFSTGQKKKARKKKTISLTTQHEATDMSQSSGGRNVVFGVRTSVSVIIALRRAVKRHRERRERQKRVFRMSLLIISTFLLCWTPISVLNTTILCLGPSDLLVKLRLCFLVMAYGTTIFHPLLYAFTRQKFQKVLKSKMKKRVVSIVEADPLPNNAVIHNSWIDPKRNKKITFEDSEIREKRLVPQVVTD

SEQ ID NO: 264 - DNA, 1209 bp, Homo sapiens
atgttgtgtccttccaagacagatggctcagggcactctggtaggattcaccaggaaactcatggagaagggaaaagggacaagattagcaacagtgaagggagggagaatggtgggagaggattccagatgaacggtgggtcgctggaggctgagcatgccagcaggatgtcagttctcagagcaaagcccatgtcaaacagccaacgcttgctccttctgtccccaggatcacctcctcgcacggggagcatctcctacatcaacatcatcatgccttcggtgttcggcaccatctgcctcctgggcatcatcgggaactccacggtcatcttcgcggtcgtgaagaagtccaagctgcactggtgcaacaacgtccccgacatcttcatcatcaacctctcggtagtagatctcctctttctcctgggcatgcccttcatgatccaccagctcatgggcaatggggtgtggcactttggggagaccatgtgcaccctcatcacggccatggatgccaatagtcagttcaccagcacctacatcctgaccgccatggccattgaccgctacctggccactgtccaccccatctcttccacgaagttccggaagccctctgtggccaccctggtgatctgcctcctgtgggccctctccttcatcagcatcacccctgtgtggctgtatgccagactcatccccttcccaggaggtgcagtgggctgcggcatacgcctgcccaacccagacactgacctctactggttcaccctgtaccagtttttcctggcctttgccctgccttttgtggtcatcacagccgcatacgtgaggatcctgcagcgcatgacgtcctcagtggcccccgcctcccagcgcagcatccggctgcggacaaagagggtgacccgcacagccatcgccatctgtctggtcttctttgtgtgctgggcaccctactatgtgctacagctgacccagttgtccatcagccgcccgaccctcacctttgtctacttatacaatgcggccatcagcttgggctatgccaacagctgcctcaacccctttgtgtacatcgtgctctgtgagacgttccgcaaacgcttggtcctgtcggtgaagcctgcagcccaggggcagcttcgcgctgtcagcaacgctcagacggctgacgaggagaggacagaaagcaaaggcacctga

SEQ ID NO: 265 - protein, 402 aa, Homo sapiens
MLCPSKTDGSGHSGRIHQETHGEGKRDKISNSEGRENGGRGFQMNGGSLEAEHASRMSVLRAKPMSNSQRLLLLSPGSPPRTGSISYINIIMPSVFGTICLLGIIGNSTVIFAVVKKSKLHWCNNVPDIFIINLSVVDLLFLLGMPFMIHQLMGNGVWHFGETMCTLITAMDANSQFTSTYILTAMAIDRYLATVHPISSTKFRKPSVATLVICLLWALSFISITPVWLYARLIPFPGGAVGCGIRLPNPDTDLYWFTLYQFFLAFALPFVVITAAYVRILQRMTSSVAPASQRSIRLRTKRVTRTAIAICLVFFVCWAPYYVLQLTQLSISRPTLTFVYLYNAAISLGYANSCLNPFVYIVLCETFRKRLVLSVKPAAQGQLRAVSNAQTADEERTESKGT

SEQ ID NO: 266 - DNA, 1083 bp, Homo sapiens
atggcccccacagagccctggagccccagcccggggtcagcgccctgggactactcggggttggacggcctggaggagctggagctgtgtccggccggggacctgccctacggctacgtctacatccccgcgctctacctggcggccttcgccgtgggcctgctgggcaacgcctttgtggtgtggctgctggccgggcggcggggcccgcggcggctggtggataccttcgtgctgcacctggcggcagctgacctgggcttcgtgctcacgctgccgctgtgggccgcggcggcggctaggcggccgtggccgttcggcgatggcctctgcaagctcagcacgttcgcgctggcgggcacgcgctcggcgggcgcgctgctgctggcgggcatgagcgtggaccgctacctggccgtggtgaagctgctcgaggcgaggccactgcgcaccccgcgctgcgccgtggcctcgtgctgcggcgtctgggccgtggcgctgctggccggcctgccctccctggtctaccgggggttgcagcccctgcctgggggccaggacagccagtgcggcgaggagccctcccacgccttccagggcctcagcttgctgctgctgctgctgaccttcgtgctgcccctggtcgtcaccctcttctgctactgccgcatctcgcgccgcctgcgacggccgccgcacgtgggtcgggcccggaggaactcgctgcgcatcatcttcgccatcgagagcacgtttgtgggctcctggctgcccttcagcgccctgcgggccgtcttccacctggcgcgtctgggggcgctgccgctgccgtgccccctgctgctggcgctgcgctggggcctcaccattgccacctgcctggccttcgtcaacagctgcgccaacccgctcatctacctcctgctggaccgctcattccgagcccgggcgctggacggggcctgcgggcgcaccggccgcctggcgcgaaggatcagctcagcctcctcgctctccagggacgacagttccgtgttccgttgccgggcccaggccgcgaacactgcctcggcctcctggtag

SEQ ID NO: 267 - protein, 360 aa, Homo sapiens
MAPTEPWSPSPGSAPWDYSGLDGLEELELCPAGDLPYGYVYIPALYLAAFAVGLLGNAFVVWLLAGRRGPRRLVDTFVLHLAAADLGFVLTLPLWAAAAARRPWPFGDGLCKLSTFALAGTRSAGALLLAGMSVDRYLAVVKLLEARPLRTPRCAVASCCGVWAVALLAGLPSLVYRGLQPLPGGQDSQCGEEPSHAFQGLSLLLLLLTFVLPLVVTLFCYCRISRRLRRPPHVGRARRNSLRIIFAIESTFVGSWLPFSALRAVFHLARLGALPLPCPLLLALRWGLTIATCLAFVNSCANPLIYLLLDRSFRARALDGACGRTGRLARRISSASSLSRDDSSVFRCRAQAANTASASW

SEQ ID NO: 268 - DNA, 993 bp, Homo sapiens
atgatgtggggtgcaggcagccctctggcctggctctcagctggctcaggcaacgtgaatgtaagcagcgtgggcccagcagaggggcccacaggtccagccgcaccactgccctcgcctaaggcctgggatgtggtgctctgcatctcaggcaccctggtgtcctgcgagaatgcgctagtggtggccatcatcgtgggcactcctgccttccgtgcccccatgttcctgctggtgggcagcctggccgtggcagacctgctggcaggcctgggcctggtcctgcactttgctgctgtcttctgcatcggctcagcggagatgagcctggtgctggttggcgtgctggcaatggcctttaccgccagcatcggcagtctactggccatcactgtcgaccgctacctttctctgtacaatgccctcacctactattcagagacaacagtgacacggacctatgtgatgctggccttagtgtggggaggtgccctgggcctggggctgctgcctgtgctggcctggaactgcctggatggcctgaccacatgtggcgtggtttatccactctccaagaaccatctggtagttctggccattgccttcttcatggtgtttggcatcatgctgcagctctacgcccaaatctgccgcatcgtctgccgccatgcccagcagattgcccttcagcggcacctgctgcctgcctcccactatgtggccacccgcaagggcattgccacactggccgtggtgcttggagcctttgccgcctgctggttgcccttcactgtctactgcctgctgggtgatgcccactctccacctctctacacctatcttaccttgctccctgccacctacaactccatgatcaaccctatcatctacgccttccgcaaccaggatgtgcagaaagtgctgtgggctgtctgctgctgctgttcctcttccaagatccccttccgatcccgctcccccagtgatgtctag

SEQ ID NO: 269 - protein, 330 aa, Homo sapiens
MMWGAGSPLAWLSAGSGNVNVSSVGPAEGPTGPAAPLPSPKAWDVVLCISGTLVSCENALVVAIIVGTPAFRAPMFLLVGSLAVADLLAGLGLVLHFAAVFCIGSAEMSLVLVGVLAMAFTASIGSLLAITVDRYLSLYNALTYYSETTVTRTYVMLALVWGGALGLGLLPVLAWNCLDGLTTCGVVYPLSKNHLVVLAIAFFMVFGIMLQLYAQICRIVCRHAQQIALQRHLLPASHYVATRKGIATLAVVLGAFAACWLPFTVYCLLGDAHSPPLYTYLTLLPATYNSMINPIIYAFRNQDVQKVLWAVCCCCSSSKIPFRSRSPSDV

SEQ ID NO: 270 - DNA, 960 bp, Homo sapiens
atgccattcccaaactgctcagcccccagcactgtggtggccacagctgtgggtgtcttgctggggctggagtgtgggctgggtctgctgggcaacgcggtggcgctgtggaccttcctgttccgggtcagggtgtggaagccgtacgctgtctacctgctcaacctggccctggctgacctgctgttggctgcgtgcctgcctttcctggccgccttctacctgagcctccaggcttggcatctgggccgtgtgggctgctgggccctgcgcttcctgctggacctcagccgcagcgtggggatggccttcctggccgccgtggctttggaccggtacctccgtgtggtccaccctcggcttaaggtcaacctgctgtctcctcaggcggccctgggggtctcgggcctcgtctggctcctgatggtcgccctcacctgcccgggcttgctcatctctgaggccgcccagaactccaccaggtgccacagtttctactccagggcagacggctccttcagcatcatctggcaggaagcactctcctgccttcagtttgtcctcccctttggcctcatcgtgttctgcaatgcaggcatcatcagggctctccagaaaagactccgggagcctgagaaacagcccaagcttcagcgggcccaggcactggtcaccttggtggtggtgctgtttgctctgtgctttctgccctgcttcctggccagagtcctgatgcacatcttccagaatctggggagctgcagggccctttgtgcagtggctcatacctcggatgtcacgggcagcctcacctacctgcacagtgtcgtcaaccccgtggtatactgcttctccagccccaccttcaggagctcctatcggagggtcttccacaccctccgaggcaaagggcaggcagcagagcccccagatttcaaccccagagactcctattcctga

SEQ ID NO: 271 - protein, 319 aa, Homo sapiens
MPFPNCSAPSTVVATAVGVLLGLECGLGLLGNAVALWTFLFRVRVWKPYAVYLLNLALADLLLAACLPFLAAFYLSLQAWHLGRVGCWALRFLLDLSRSVGMAFLAAVALDRYLRVVHPRLKVNLLSPQAALGVSGLVWLLMVALTCPGLLISEAAQNSTRCHSFYSRADGSFSIIWQEALSCLQFVLPFGLIVFCNAGIIRALQKRLREPEKQPKLQRAQALVTLVVVLFALCFLPCFLARVLMHIFQNLGSCRALCAVAHTSDVTGSLTYLHSVVNPVVYCFSSPTFRSSYRRVFHTLRGKGQAAEPPDFNPRDSYS

SEQ ID NO: 272 - DNA, 2696 bp, Homo sapiens
ctggtgaccttacttatctctgttgctttctggggtcctaggaaatgccagcactcccacccacattgcctgaactttccaacactccctagctgcgctgtgtcctatctcaacacttcctcatgtatttcttgtgtcttctagaacattcccccgccattattacttcaatatggctacacatacttcctaattgccctgcaaaccatctccttctcaccattgcccagcgatgctttcgtctcctccataaacactcccggagaccaatttttgtgtcacccccatactccctcgttgacacactgactccatacataacctccttgaaaaacctctttattaatctcaccatcctccagacttccctcctgtcataattccatccctcctccaacttttccctctcaagctctgcccttcccagcccagcccagcctacccaacctcatctcttccctgtagaccacatcccaccatgttcccctgagcctccaaggaaggggctcagggggccccatggcctcccgctccctgtggccccacagcccccgtgggccaggggaagcgccccagaagccgaagtgcccaccatgggcaaccacacgtgggagggctgccacgtggactcgcgcgtggaccacctctttccgccatccctctacatctttgtcatcggcgtggggctgcccaccaactgcctggctctgtgggcggcctaccgccaggtgcaacagcgcaacgagctgggcgtctacctgatgaacctcagcatcgccgacctgctgtacatctgcacgctgccgctgtgggtggactacttcctgcaccacgacaactggatccacggccccgggtcctgcaagctctttgggttcatcttctacaccaatatctacatcagcatcgccttcctgtgctgcatctcggtggaccgctacctggctgtggcccacccactccgcttcgcccgcctgcgccgcgtcaagaccgccgtggccgtgagctccgtggtctgggccacggagctgggcgccaactcggcgcccctgttccatgacgagctcttccgagaccgctacaaccacaccttctgctttgagaagttccccatggaaggctgggtggcctggatgaacctctatcgggtgttcgtgggcttcctcttcccgtgggcgctcatgctgctgtcgtaccggggcatcctgcgggccgtgcggggcagcgtgtccaccgagcgccaggagaaggccaagatcaagcggctggccctcagcctcatcgccatcgtgctggtctgctttgcgccctatcacgtgctcttgctgtcccgcagcgccatctacctgggccgcccctgggactgcggcttcgaggagcgcgtcttttctgcataccacagctcactggctttcaccagcctcaactgtgtggcggaccccatcctctactgcctggtcaacgagggcgcccgcagcgatgtggccaaggccctgcacaacctgctccgctttctggccagcgacaagccccaggagatggccaatgcctcgctcaccctggagaccccactcacctccaagaggaacagcacagccaaagccatgactggcagctgggcggccactccgccctcccagggggaccaggtgcagctgaagatgctgccgccagcacaatgaaccccgagtggcacagaatccccagttttcccctctcatcccacagtcccttctctcctggtctggtgtatgcaaattgtatggaaaaagggctgtgttaatattcataagaatacaagaacttaggaagagtgaggttggtgtgtcactggtcaacctttgtgctcccagatcccatcacagtttggcgattgtggagggcctcctgaaggaggagatgagtaaatatatttttttggagacagggtctcactgtgttgcccaggctggagtgcagtagtgcagtcgtggctcactgcagcctccacctcctgggctctccagcgatcttcccacatcagcctcccgagtagctgggaccacaaatgtgagcccacccatgcctggctaatttttgtactttttgtataaatggagtctcactatgtttccccaggctgatcttgaactcctgggctcaagagatcctcctgccttggcctcccaaagtgctcagattagagatgtgagccgccatgtctggccagataaattaagtcaaacatttggtttccagaaaataaagacaaatagagaaggttagatttttttttttccaacaagtggataaaagtctgtgactcgggggaaagtggaaggagaaatgcagccgatatagagtcattatgtttgcaaagcccctggtcatacaggccagggaacataagaccgcaattctaagtttctagataaacagcgatctccaagtcaagactgaggatgaagagggagaatgtcagaactcaagtgaagggcaatcagggcagactgcctggaggagtgatgccagaaggtttgggaagaaggtgtgggacaagaagaaagggtatttattcattcattcaacagaggtttatgtagggcactgtgctgggtggggctggggacacaacaatgactgaggcagcctggccttgccttcacagggctcaccatacacaagtaaataaaaaatatgtaatgtttggaattgct

SEQ ID NO: 273 - protein, 362 aa, Homo sapiens
MGNHTWEGCHVDSRVDHLFPPSLYIFVIGVGLPTNCLALWAAYRQVQQRNELGVYLMNLSIADLLYICTLPLWVDYFLHHDNWIHGPGSCKLFGFIFYTNIYISIAFLCCISVDRYLAVAHPLRFARLRRVKTAVAVSSVVWATELGANSAPLFHDELFRDRYNHTFCFEKFPMEGWVAWMNLYRVFVGFLFPWALMLLSYRGILRAVRGSVSTERQEKAKIKRLALSLIAIVLVCFAPYHVLLLSRSAIYLGRPWDCGFEERVFSAYHSSLAFTSLNCVADPILYCLVNEGARSDVAKALHNLLRFLASDKPQEMANASLTLETPLTSKRNSTAKAMTGSWAATPPSQGDQVQLKMLPPAQ

SEQ ID NO: 274 - DNA, 1089 bp, Homo sapiens
atgaacgcgagcgccgcctcgctcaacgactcccaggtggtggtagtggcggccgaaggagcggcggcggcggccacagcagcaggggggccggacacgggcgaatggggaccccctgctgcggcggctctaggagccggcggcggagctaatgggtctctggagctgtcctcgcagctgtcggctgggccaccgggactcctgctgccagcggtgaatccgtgggacgtgctcctgtgcgtgtcggggacagtgatcgctggagaaaacgcgctggtggtggcgctcatcgcgtccactccggcgctgcgcacgcccatgttcgtgctggtaggcagcctggccaccgctgacctgttggcgggctgtggcctcatcttgcactttgtgttccagtacttggtgccctcggagactgtgagtctgctcacggtgggcttcctcgtggcctccttcgccgcctctgtcagcagcctgctggccattacggtggaccgctacctgtccctgtataacgcgctcacctattactcgcgccggaccctgttgggcgtgcacctcctgcttgccgccacttggaccgtgtccctaggcctggggctgctgcccgtgctgggctggaactgcctggcagagcgcgccgcctgcagcgtggtgcgcccgctggcgcgcagccacgtggctctgctctccgccgccttcttcatggtcttcggcatcatgctgcacctgtacgtgcgcatctgccaggtggtctggcgccacgcgcaccagatcgcgctgcagcagcactgcctggcgccaccccatctcgctgccaccagaaagggtgtgggtacactggctgtggtgctgggcactttcggcgccagctggctgcccttcgccatctattgcgtggtgggcagccatgaggacccggcggtctacacttacgccaccctgctgcccgccacctacaactccatgatcaatcccatcatctatgccttccgcaaccaggagatccagcgcgccctgtggctcctgctctgtggctgtttccagtccaaagtgccctttcgttccaggtctcccagcgaggtctga

SEQ ID NO: 275 - protein, 362 aa, Homo sapiens
MNASAASLNDSQVVVVAAEGAAAAATAAGGPDTGEWGPPAAAALGAGGGANGSLELSSQLSAGPPGLLLPAVNPWDVLLCVSGTVIAGENALVVALIASTPALRTPMFVLVGSLATADLLAGCGLILHFVFQYLVPSETVSLLTVGFLVASFAASVSSLLAITVDRYLSLYNALTYYSRRTLLGVHLLLAATWTVSLGLGLLPVLGWNCLAERAACSVVRPLARSHVALLSAAFFMVFGIMLHLYVRICQVVWRHAHQIALQQHCLAPPHLAATRKGVGTLAVVLGTFGASWLPFAIYCVVGSHEDPAVYTYATLLPATYNSMINPIIYAFRNQEIQRALWLLLCGCFQSKVPFRSRSPSEV

SEQ ID NO: 276 - DNA, 987 bp, Homo sapiens
atggacaacgcctcgttctcggagccctggcccgccaacgcatcgggcccggacccggcgctgagctgctccaacgcgtcgactctggcgccgctgccggcgccgctggcggtggctgtaccagttgtctacgcggtgatctgcgccgtgggtctggcgggcaactccgccgtgctgtacgtgttgctgcgggcgccccgcatgaagaccgtcaccaacctgttcatcctcaacctggccatcgccgacgagctcttcacgctggtgctgcccatcaacatcgccgacttcctgctgcggcagtggcccttcggggagctcatgtgcaagctcatcgtggctatcgaccagtacaacaccttctccagcctctacttcctcaccgtcatgagcgccgaccgctacctggtggtgttggccactgcggagtcgcgccgggtggccggccgcacctacagcgccgcgcgcgcggtgagcctggccgtgtgggggatcgtcacactcgtcgtgctgcccttcgcagtcttcgcccggctagacgacgagcagggccggcgccagtgcgtgctagtctttccgcagcccgaggccttctggtggcgcgcgagccgcctctacacgctcgtgctgggcttcgccatccccgtgtccaccatctgtgtcctctataccaccctgctgtgccggctgcatgccatgcggctggacagccacgccaaggccctggagcgcgccaagaagcgggtgaccttcctggtggtggcaatcctggcggtgtgcctcctctgctggacgccctaccacctgagcaccgtggtggcgctcaccaccgacctcccgcagacgccgctggtcatcgctatctcctacttcatcaccagcctgacgtacgccaacagctgcctcaaccccttcctctacgccttcctggacgccagcttccgcaggaacctccgccagctgataacttgccgcgcggcagcctga

SEQ ID NO: 277 - protein, 328 aa, Homo sapiens
MDNASFSEPWPANASGPDPALSCSNASTLAPLPAPLAVAVPVVYAVICAVGLAGNSAVLYVLLRAPRMKTVTNLFILNLAIADELFTLVLPINIADFLLRQWPFGELMCKLIVAIDQYNTFSSLYFLTVMSADRYLVVLATAESRRVAGRTYSAARAVSLAVWGIVTLVVLPFAVFARLDDEQGRRQCVLVFPQPEAFWWRASRLYTLVLGFAIPVSTICVLYTTLLCRLHAMRLDSHAKALERAKKRVTFLVVAILAVCLLCWTPYHLSTVVALTTDLPQTPLVIAISYFITSLTYANSCLNPFLYAFLDASFRRNLRQLITCRAAA

SEQ ID NO: 278 - DNA, 1002 bp, Homo sapiens
atgcaggccgctgggcacccagagccccttgacagcaggggctccttctccctccccacgatgggtgccaacgtctctcaggacaatggcactggccacaatgccaccttctccgagccactgccgttcctctatgtgctcctgcccgccgtgtactccgggatctgtgctgtggggctgactggcaacacggccgtcatccttgtaatcctaagggcgcccaagatgaagacggtgaccaacgtgttcatcctgaacctggccgtcgccgacgggctcttcacgctggtactgcccgtcaacatcgcggagcacctgctgcagtactggcccttcggggagctgctctgcaagctggtgctggccgtcgaccactacaacatcttctccagcatctacttcctagccgtgatgagcgtggaccgatacctggtggtgctggccaccgtgaggtcccgccacatgccctggcgcacctaccggggggcgaaggtcgccagcctgtgtgtctggctgggcgtcacggtcctggttctgcccttcttctctttcgctggcgtctacagcaacgagctgcaggtcccaagctgtgggctgagcttcccgtggcccgagcgggtctggttcaaggccagccgtgtctacactttggtcctgggcttcgtgctgcccgtgtgcaccatctgtgtgctctacacagacctcctgcgcaggctgcgggccgtgcggctccgctctggagccaaggctctaggcaaggccaggcggaaggtgaccgtcctggtcctcgtcgtgctggccgtgtgcctcctctgctggacgcccttccacctggcctctgtcgtggccctgaccacggacctgccccagaccccactggtcatcagtatgtcctacgtcatcaccagcctcacgtacgccaactcgtgcctgaaccccttcctctacgcctttctagatgacaacttccggaagaacttccgcagcatattgcggtgctga

SEQ ID NO: 279 - protein, 333 aa, Homo sapiens [sequence omitted]

SEQ ID NO: 280 - DNA, 2051 bp, Homo sapiens
cgccactttgctggagcattcactaggcgaggcgctccatcggactcactagccgcactcatgaatcggcaccatctgcaggatcactttctggaaatagacaagaagaactgctgtgtgttccgagatgacttcattgccaaggtgttgccgccggtgttggggctggagtttatctttgggcttctgggcaatggccttgccctgtggattttctgtttccacctcaagtcctggaaatccagccggattttcctgttcaacctggcagtagctgactttctactgatcatctgcctgccgttcgtgatggactactatgtgcggcgttcagactggaactttggggacatcccttgccggctggtgctcttcatgtttgccatgaaccgccagggcagcatcatcttcctcacggtggtggcggtagacaggtatttccgggtggtccatccccaccacgccctgaacaagatctccaattggacagcagccatcatctcttgccttctgtggggcatcactgttggcctaacagtccacctcctgaagaagaagttgctgatccagaatggccctgcaaatgtgtgcatcagcttcagcatctgccataccttccggtggcacgaagctatgttcctcctggagttcctcctgcccctgggcatcatcctgttctgctcagccagaattatctggagcctgcggcagagacaaatggaccggcatgccaagatcaagagagccatcaccttcatcatggtggtggccatcgtctttgtcatctgcttccttcccagcgtggttgtgcggatccgcatcttctggctcctgcacacttcgggcacgcagaattgtgaagtgtaccgctcggtggacctggcgttctttatcactctcagcttcacctacatgaacagcatgctggaccccgtggtgtactacttctccagcccatcctttcccaacttcttctccactttgatcaaccgctgcctccagaggaagatgacaggtgagccagataataaccgcagcacgagcgtcgagctcacaggggaccccaacaaaaccagaggcgctccagaggcgttaatggccaactccggtgagccatggagcccctcttatctgggcccaacctcaaataaccattccaagaagggacattgtcaccaagaaccagcatctctggagaaacagttgggctgttgcatcgagtaatgtcactggactcggcctaaggtttcctggaacttccagattcagagaatctgatttagggaaactgtggcagatgagtgggagactggttgcaaggtgtgaccacaggaatcctggaggaacagagagtaaagcttctaggcatctgaaacttgcttcatctctgacgctcgcaggactgaagatgggcaaattgtaggcgtttctgctgagcagagttggagccagagatctacttgtgacttgttggccttcttcccacatctgcctcagactggggggggctcagctcctcgggtgatatctagcctgcttgtgagctctagcagggataaggagagctgagattggagggaattgtgttgctcctggaggaagcccaggcatcattaaacaagccagtaggtcacctggcttccgtggaccaattcatctttcagacaagctttagagaaatggactcagggaagagactcacatgctttggttagtatctgtgtttccggtgggtgtaataggggattagccccagaagggactgagctaaacagtgttattatgggaaaggaaatggcattgctgctttcaaccagcgactaatgcaatccattcctctcttgtttatagtaatctaagggttgagcagttaaaacggcttcaggatagaaagctgtttcccacctgtttcgttttaccattaaaagggaaacgtgcctctgccccacgggtagagggggtgcacgttcctcctggttccttcgcttgtgtttctgtacttaccaaaaatctaccacttcaataaattttgataggagacaaaaaaaaaa

SEQ ID NO: 281 - protein, 387 aa, Homo sapiens
MNRHHLQDHFLEIDKKNCCVFRDDFIAKVLPPVLGLEFIFGLLGNGLALWIFCFHLKSWKSSRIFLFNLAVADFLLIICLPFVMDYYVRRSDWNFGDIPCRLVLFMFAMNRQGSIIFLTVVAVDRYFRVVHPHHALNKISNWTAAIISCLLWGITVGLTVHLLKKKLLIQNGPANVCISFSICHTFRWHEAMFLLEFLLPLGIILFCSARIIWSLRQRQMDRHAKIKRAITFIMVVAIVFVICFLPSVVVRIRIFWLLHTSGTQNCEVYRSVDLAFFITLSFTYMNSMLDPVVYYFSSPSFPNFFSTLINRCLQRKMTGEPDNNRSTSVELTGDPNKTRGAPEALMANSGEPWSPSYLGPTSNNHSKKGHCHQEPASLEKQLGCCIE

SEQ ID NO: 282 - DNA, 1098 bp, Homo sapiens
atggggaacatcactgcagacaactcctcgatgagctgtaccatcgaccataccatccaccagacgctggccccggtggtctatgttaccgtgctggtggtgggcttcccggccaactgcctgtccctctacttcggctacctgcagatcaaggcccggaacgagctgggcgtgtacctgtgcaacctgacggtggccgacctcttctacatctgctcgctgcccttctggctgcagtacgtgctgcagcacgacaactggtctcacggcgacctgtcctgccaggtgtgcggcatcctcctgtacgagaacatctacatcagcgtgggcttcctctgctgcatctccgtggaccgctacctggctgtggcccatcccttccgcttccaccagttccggaccctgaaggcggccgtcggcgtcagcgtggtcatctgggccaaggagctgctgaccagcatctacttcctgatgcacgaggaggtcatcgaggacgagaaccagcaccgcgtgtgctttgagcactaccccatccaggcatggcagcgcgccatcaactactaccgcttcctggtgggcttcctcttccccatctgcctgctgctggcgtcctaccagggcatcctgcgcgccgtgcgccggagccacggcacccagaagagccgcaaggaccagatccagcggctggtgctcagcaccgtggtcatcttcctggcctgcttcctgccctaccacgtgttgctgctggtgcgcagcgtctgggaggccagctgcgacttcgccaagggcgttttcaacgcctaccacttctccctcctgctcaccagcttcaactgcgtcgccgaccccgtgctctactgcttcgtcagcgagaccacccaccgggacctggcccgcctccgcggggcctgcctggccttcctcacctgctccaggaccggccgggccagggaggcctacccgctgggtgcccccgaggcctccgggaaaagcggggcccagggtgaggagcccgagctgttgaccaagctccacccggccttccagacccctaactcgccagggtcgggcgggttccccacgggcaggttggcctag

SEQ ID NO: 283 - protein, 365 aa, Homo sapiens
MGNITADNSSMSCTIDHTIHQTLAPVVYVTVLVVGFPANCLSLYFGYLQIKARNELGVYLCNLTVADLFYICSLPFWLQYVLQHDNWSHGDLSCQVCGILLYENIYISVGFLCCISVDRYLAVAHPFRFHQFRTLKAAVGVSVVIWAKELLTSIYFLMHEEVIEDENQHRVCFEHYPIQAWQRAINYYRFLVGFLFPICLLLASYQGILRAVRRSHGTQKSRKDQIQRLVLSTVVIFLACFLPYHVLLLVRSVWEASCDFAKGVFNAYHFSLLLTSFNCVADPVLYCFVSETTHRDLARLRGACLAFLTCSRTGRAREAYPLGAPEASGKSGAQGEEPELLTKLHPAFQTPNSPGSGGFPTGRLA

SEQ ID NO: 284 - DNA, 1862 bp, Homo sapiens
agcaagtgaaggcacagacgcacgggacaggagagcctgggcaagactggagagcccagacctgggatggcggattcgtgcaggaacctcacctacgtgcggggctcggtggggccggccaccagcaccctgatgttcgtggccggtgtggtgggcaacgggctggccctgggcatcctgagcgcacggcgaccggcgcgcccctcggccttcgcggtgctggtcaccggactggcggccaccgacctgctgggcaccagcttcctgagcccggccgtgttcgtggcctatgcgcgcaacagctccctgctgggcctggcccgaggcggccccgccctgtgcgatgccttcgccttcgccatgaccttcttcggcctggcgtccatgctcatcctctttgccatggccgtggagcgctgcctggcgctgagccacccctacctctacgcgcagctggacgggccccgctgcgcccgcctggcgctgccagccatctacgccttctgcgtcctcttctgcgcgctgcccctgctgggcctgggccaacaccagcagtactgccccggcagctggtgcttcctccgcatgcgctgggcccagccgggcggcgccgccttctcgctggcctacgccggcctggtggccctgctggtggctgccatcttcctctgcaacggctcggtcaccctcagcctctgccgcatgtaccgccagcagaagcgccaccagggctctctgggtccacggccgcgcaccggagaggacgaggtggaccacctgatcctgctggccctcatgacagtggtcatggccgtgtgctccctgcctctcacgatccgctgcttcacccaggctgtcgcccctgacagcagcagtgagatgggggacctccttgccttccgcttctacgccttcaaccccatcctggacccctgggtcttcatccttttccgcaaggctgtcttccagcgactcaagctctgggtctgctgcctgtgcctcgggcctgcccacggagactcgcagacacccctttcccagctcgcctccgggaggagggacccaagggccccctctgctcctgtgggaaaggaggggagctgcgtgcctttgtcggcttggggcgaggggcaggtggagcccttgcctcccacacagcagtccagcggcagcgccgtgggaacgtcgtccaaagcagaagccagcgtcgcctgctccctctgctgacatttcaagctgaccctgtgatctctgccctgtcttcgggcgacaggagccagaaaatcagggacatggctgatggctgcggatgctggaaccttggcccccaaactctggggccgatcagctgctgtttctcctgcggcagggcagtcgctgctggctctgggaagagagtgagggacagaggaaacgtttatcctggagtgcagaaagaatggttctctcaaaataaccagtggcctggccgacctgctctggccctggattccccatccatctcattgtctaaatatttagaaggcggagaagttcccagaggcttctgtacagtcaggtctgctctggtctgggtgctggctccaatctgcgtccacttaggaggcccaactgcccaccccaagtccccaggggatggccctccccctctaccaagccactccaagagccagccccctttctgctccacaaaaaccacagttattggaaaagctccctgccttcccttgccgctggtcccccaccaggcttgggagccctggcatcccaaaggggcaacgggaggaaggggaggctgctgcattgtgggtgatgacgtaggacatgtgcttggtacaaaaagggcctgagacattccacct

SEQ ID NO: 285 - protein, 386 aa, Homo sapiens [sequence omitted]

SEQ ID NO: 286 - DNA, 495 bp, Homo sapiens
gctgtgcaacctcggcgccatgcgcaacctctatgcgatgcaccggcggctgcagcggcacccgcgctcctgcaccagggactgtgccgagccgcgcgcggacgggagggaagcgtcccctcagcccctggaggagctggatcacctcctgctgctggcgctgatgaccgtgctcttcactatgtgttctctgcccgtaatttatcgcgcttactatggagcatttaaggatgtcaaggagaaaaacaggacctctgaagaagcagaagacctccgagccttgcgatttctatctgtgatttcaattgtggacccttggatttttatcattttcagatctccagtatttcggatattttttcacaagattttcattagacctcttaggtacaggagccggtgcagcaattccactaacatggaatccagtctgtgacagtgtttttcactctgtggtaagctgaggaatatgtcacattttcagtcaaagaacca

SEQ ID NO: 287 - protein, 359 aa, Homo sapiens
MKSPFYRCQNTTSVEKGNSAVMGGVLFSTGLLGNLLALGLLARSGLGWCSRRPLRPLPSVFYMLVCGLTVTDLLGKCLLSPVVLAAYAQNRSLRVLAPALDNSLCQAFAFFMSFFGLSSTLQLLAMALECWLSLGHPFFYRRHITLRLGALVAPVVSAFSLAFCALPFMGFGKFVQYCPGTWCFIQMVHEEGSLSVLGYSVLYSSLMALLVLATVLCNLGAMRNLYAMHRRLQRHPRSCTRDCAEPRADGREASPQPLEELDHLLLLALMTVLFTMCSLPVIYRAYYGAFKDVKEKNRTSEEAEDLRALRFLSVISIVDPWIFIIFRSPVFRIFFHKIFIRPLRYRSRCSNSTNMESSL

SEQ ID NO: 288 - DNA, 1376 bp, Homo sapiens
gggggcggcagggctgagcggccggtgatggggaccccacatcccaggcagtgccggcacccctggcgcctgacatgagcccttgcgggcccctcaacctgagcctggcgggcgaggcgaccacatgcgcggcgccctgggtccccaacacgtcggccgtgccgccgtcgggcgcttcgcccgcgctgcccatcttctccatgacgctgggcgccgtgtccaacctgctggcgctggcgctgctggcgcaggccgcgggccgcctgcgacgccgccgctcggccaccaccttcctgctgttcgtggccagcctgctggccaccgacctggcgggccacgtgatcccgggcgcgctggtgctgcgtctgtacactgcggggcgcgctccggccggcggggcctgccacttcctgggcggctgcatggtcttcttcggcctgtgcccgctgctgctgggctgtggcatggccgtggagcgctgcgtgggcgtcacgcggccgctgctccacgccgcgcgggtctcggtcgcccgcgcgcgcctggcgctggccgcggtggccgcggtggccttggccgtggcgctgctgccgctggcgcgcgtgggccgctatgagctgcagtacccgggcacgtggtgcttcatcggcctgggtcccccgggcggctggcgccaggcactgcttgctggcctcttcgccagcctcggcctggtcgcgctcctcgccgcgctggtgtgcaacacgctcagcggcctggccctgcatcgcgcccgctggcgacgccgctcccgacggcctcccccggcctcaggccccgacagccggcgtcgctggggggcgcacggaccccgctcggcctccgcctcgtccgcctcgtccatcgcttcggcctccaccttctttggcggctctcggagcagcggctcggcacgcagagctcgcgcccacgacgtggagatggtgggccagcttgtcggtatcatggtggtgtcgtgcatctgctggagcccaatgctggtgttggtggcgctggccgtcggcggctggagctctacctccctgcagcggccactgttcctggccgtgcgccttgcctcctggaaccagatcctggacccttgggtgtacatcctactgcgccaggccgtgctgcgccaactgcttcgcctcttgcccccgagggccggagccaagggcggccccgcggggctgggcctaacaccgagcgcctgggaggccagctcgctgcgcagctcccggcacagcggcctcagccacttctaagcacaaccagaggcccaacgactaagccagcccaccctgggctgggcccaggtgcgcggcgcagagcctttgggaataaaaagccattctgcg

SEQ ID NO: 289 - protein, 402 aa, Homo sapiens
MSPCGPLNLSLAGEATTCAAPWVPNTSAVPPSGASPALPIFSMTLGAVSNLLALALLAQAAGRLRRRRSATTFLLFVASLLATDLAGHVIPGALVLRLYTAGRAPAGGACHFLGGCMVFFGLCPLLLGCGMAVERCVGVTRPLLHAARVSVARARLALAAVAAVALAVALLPLARVGRYELQYPGTWCFIGLGPPGGWRQALLAGLFASLGLVALLAALVCNTLSGLALHRARWRRRSRRPPPASGPDSRRRWGAHGPRSASASSASSIASASTFFGGSRSSGSARRARAHDVEMVGQLVGIMVVSCICWSPMLVLVALAVGGWSSTSLQRPLFLAVRLASWNQILDPWVYILLRQAVLRQLLRLLPPRAGAKGGPAGLGLTPSAWEASSLRSSRHSGLSHF

SEQ ID NO: 290 - DNA, 2372 bp, Homo sapiens
gggccgccgtcggcgcgctgggtgcgggaagggggctctggatttcggtccctcccctttttcctctgagtctcggaacgctccagctctcagaccctcttcctcccaggtaaaggccgggagaggagggcgcatctcttttccaggcaccccaccatgggcaatgcctccaatgactcccagtctgaggactgcgagacgcgacagtggcttcccccaggcgaaagcccagccatcagctccgtcatgttctcggccggggtgctggggaacctcatagcactggcgctgctggcgcgccgctggcggggggacgtggggtgcagcgccggccgcaggagctccctctccttgttccacgtgctggtgaccgagctggtgttcaccgacctgctcgggacctgcctcatcagcccagtggtactggcttcgtacgcgcggaaccagaccctggtggcactggcgcccgagagccgcgcgtgcacctacttcgctttcgccatgaccttcttcagcctggccacgatgctcatgctcttcgccatggccctggagcgctacctctcgatcgggcacccctacttctaccagcgccgcgtctcggcctccgggggcctggccgtgctgcctgtcatctatgcagtctccctgctcttctgctcgctgccgctgctggactatgggcagtacgtccagtactgccccgggacctggtgcttcatccggcacgggcggaccgcttacctgcagctgtacgccaccctgctgctgcttctcattgtctcggtgctcgcctgcaacttcagtgtcattctcaacctcatccgcatgcaccgccgaagccggagaagccgctgcggaccttccctgggcagtggccggggcggccccggggcccgcaggagaggggaaagggtgtccatggcggaggagacggaccacctcattctcctggctatcatgaccatcaccttcgccgtctgctccttgcctttcacgatttttgcatatatgaatgaaacctcttcccgaaaggaaaaatgggacctccaagctcttaggtttttatcaattaattcaataattgacccttgggtctttgccatccttaggcctcctgttctgagactaatgcgttcagtcctctgttgtcggatttcattaagaacacaagatgcaacacaaacttcctgttctacacagtcagatgccagtaaacaggctgacctttgaggtcagtagtttaaaagttcttagttatatagcatctggaagatcattttgaaattgttccctggagaaatgaaaacagtgtgtaaacaaaatgaagctgccctaataaaaaggagtatacaaacatttaagctgtggtcaaggctacagatgtgctgacaaggcacttcatgtaaagtgtcagaaggagctacaaaacctaccctcaatgagcatggtacttggcctttggaggaacaatcggctgcattgaagatccagctgcctattgatttaagctttcctgttgaatgacaaagtatgtggttttgtaatttgtttgaaaccccaaacagtgactgtactttctattttaatcttgctactaccgttatacacatatagtgtacagccagaccagattaaacttcatatgtaatctctaggaagtcaatatgtggaagcaaccaagcctgctgtcttgtgatcacttagcgaaccctttatttgaacaatgaagttgaaaatcataggcaccttttactgtgatgtttgtgtatgtgggagtactctcatcactacagtattactcttacaagagtggactcagtgggttaacatcagttttgtttactcatcctccaggaactgcaggtcaagttgtcaggttatttattttataatgtccatatgctaatagtgatcaagaagactttaggaatggttctctcaacaagaaataatagaaatgtctcaaggcagttaattctcattaatactcttattatcctatttctgggggaggatgtacgtggccatgtatgaagccaaatattaggcttaaaaactgaaaaatctggttcattcttcagatatactggaacccttttaaagttgatattggggccatgagtaaaatagattttataagatgactgtgttgtaccaaaattcatctgtctatattttatttaggggaacatggtttgactcatcttatatgggaaaccatgtagcagtgagtcatatcttaatatatttctaaatgtttggcatgtaaatgtaaactcagcatcaaaatatttcagtgaatttgcactgtttaatcatagttactgtgtaaactcatctgaaatgttacaaaaataaactataaaaca

SEQ ID NO: 291 - protein, 358 aa, Homo sapiens
MGNASNDSQSEDCETRQWLPPGESPAISSVMFSAGVLGNLIALALLARRWRGDVGCSAGRRSSLSLFHVLVTELVFTDLLGTCLISPVVLASYARNQTLVALAPESRACTYFAFAMTFFSLATMLMLFAMALERYLSIGHPYFYQRRVSASGGLAVLPVIYAVSLLFCSLPLLDYGQYVQYCPGTWCFIRHGRTAYLQLYATLLLLLIVSVLACNFSVILNLIRMHRRSRRSRCGPSLGSGRGGPGARRRGERVSMAEETDHLILLAIMTITFAVCSLPFTIFAYMNETSSRKEKWDLQALRFLSINSIIDPWVFAILRPPVLRLMRSVLCCRISLRTQDATQTSCSTQSDASKQADL

SEQ ID NO: 292 - DNA, 48 bp, Homo sapiens
atgagaaaaagaagactcagagagcaagaggaattttggggaaattaa

SEQ ID NO: 293 - DNA, 1922 bp, Homo sapiens
accagaggtttcccagagaggaaggcgtggctccctcccgggccagtgagccctggcgccgccgcggccgcggtcccagcagcggagtagggcggcggctgcgccccgcaccatggggggcagcccagccccagccgcggtaaacgccgacctccgccgccgcccgcgccgcgtctgccccctcccgctgcggctctctggacgccatcccctcctcacctcgaagccaacatgaaggagacccggggctacggaggggatgcccccttctgcacccgcctcaaccactcctacacaggcatgtgggcgcccgagcgttccgccgaggcgcggggcaacctcacgcgccctccagggtctggcgaggattgcggatcggtgtccgtggccttcccgatcaccatgctgctcactggtttcgtgggcaacgcactggccatgctgctcgtgtcgcgcagctaccggcgccgggagagcaagcgcaagaagtccttcctgctgtgcatcggctggctggcgctcaccgacctggtcgggcagcttctcaccaccccggtcgtcatcgtcgtgtacctgtccaagcagcgttgggagcacatcgacccgtcggggcggctctgcacctttttcgggctgaccatgactgttttcgggctctcctcgttgttcatcgccagcgccatggccgtcgagcgggcgctggccatcagggcgccgcactggtatgcgagccacatgaagacgcgtgccacccgcgctgtgctgctcggcgtgtggctggccgtgctcgccttcgccctgctgccggtgctgggcgtgggccagtacaccgtccagtggcccgggacgtggtgcttcatcagcaccgggcgagggggcaacgggactagctcttcgcataactggggcaaccttttcttcgcctctgcctttgccttcctggggctcttggcgctgacagtcaccttttcctgcaacctggccaccattaaggccctggtgtcccgctgccgggccaaggccacggcatctcagtccagtgcccagtggggccgcatcacgaccgagacggccattcagcttatggggatcatgtgcgtgctgtcggtctgctggtctccgctcctgataatgatgttgaaaatgatcttcaatcagacatcagttgagcactgcaagacacacacggagaagcagaaagaatgcaacttcttcttaatagctgttcgcctggcttcactgaaccagatcttggatccttgggtttacctgctgttaagaaagatccttcttcgaaagttttgccagatgagaaaaagaagactcagagagcaagagatggggcctgatggaaggtgtttttgtcatgcatggaggcaggtccccaggacttggtgcagttctcatgatagagaaccctgcagtgtccagctaagctgatgacttgaagataaatctgcctaaccctgggatgaagtatctgtgaactattttgacagcagatgaggaattttggggaaattaaaacctgcctttctgccaggatcacatcactggaagctccatgactctctttttgtaaaagaaaaaaaaatcacagaaacacccacctcccaaactattctcttttacttcttcccccaagcccacccccaaatataactgttatccagaagctgttatgtcctgtttccatacatgtttttgtacttttactatatctacatacatcaattaaacttatgtcctattgttttgtgaatttatatttgcgtatacattatcatatgtaaaatttgcatttttttattgaaaattatgtttcttgagatttatccacattgaaacatggagctctaaatcgttaattttaaccgctatagagtattccataatttgaataaagcataatttgtttgtac

SEQ ID NO: 294 - protein, 402 aa, Homo sapiens
MKETRGYGGDAPFCTRLNHSYTGMWAPERSAEARGNLTRPPGSGEDCGSVSVAFPITMLLTGFVGNALAMLLVSRSYRRRESKRKKSFLLCIGWLALTDLVGQLLTTPVVIVVYLSKQRWEHIDPSGRLCTFFGLTMTVFGLSSLFIASAMAVERALAIRAPHWYASHMKTRATRAVLLGVWLAVLAFALLPVLGVGQYTVQWPGTWCFISTGRGGNGTSSSHNWGNLFFASAFAFLGLLALTVTFSCNLATIKALVSRCRAKATASQSSAQWGRITTETAIQLMGIMCVLSVCWSPLLIMMLKMIFNQTSVEHCKTHTEKQKECNFFLIAVRLASLNQILDPWVYLLLRKILLRKFCQMRKRRLREQEMGPDGRCFCHAWRQVPRTWCSSHDREPCSVQLS

SEQ ID NO: 295 - DNA, 1958 bp, Homo sapiens
cggcacagcctcacacctgaacgctgtcctcccgcagacgagaccggcgggcactgcaaagctgggactcgtctttgaaggaaaaaaaatagcgagtaagaaatccagcaccattcttcactgacccatcccgctgcacctcttgtttcccaagtttttgaaagctggcaactctgacctcggtgtccaaaaatcgacagccactgagaccggctttgagaagccgaagatttggcagtttccagactgagcaggacaaggtgaaagcaggttggaggcgggtccaggacatctgagggctgaccctgggggctcgtgaggctgccaccgctgctgccgctacagacccagccttgcactccaaggctgcgcaccgccagccactatcatgtccactcccggggtcaattcgtccgcctccttgagccccgaccggctgaacagcccagtgaccatcccggcggtgatgttcatcttcggggtggtgggcaacctggtggccatcgtggtgctgtgcaagtcgcgcaaggagcagaaggagacgaccttctacacgctggtatgtgggctggctgtcaccgacctgttgggcactttgttggtgagcccggtgaccatcgccacgtacatgaagggccaatggcccgggggccagccgctgtgcgagtacagcaccttcattctgctcttcttcagcctgtccggcctcagcatcatctgcgccatgagtgtcgagcgctacctggccatcaaccatgcctatttctacagccactacgtggacaagcgattggcgggcctcacgctctttgcagtctatgcgtccaacgtgctcttttgcgcgctgcccaacatgggtctcggtagctcgcggctgcagtacccagacacctggtgcttcatcgactggaccaccaacgtgacggcgcacgccgcctactcctacatgtacgcgggcttcagctccttcctcattctcgccaccgtcctctgcaacgtgcttgtgtgcggcgcgctgctccgcatgcaccgccagttcatgcgccgcacctcgctgggcaccgagcagcaccacgcggccgcggccgcctcggttgcctcccggggccaccccgctgcctccccagccttgccgcgcctcagcgactttcggcgccgccggagcttccgccgcatcgcgggcgccgagatccagatggtcatcttactcattgccacctccctggtggtgctcatctgctccatcccgctcgtggtgcgagtattcgtcaaccagttatatcagccaagtttggagcgagaagtcagtaaaaatccagatttgcaggccatccgaattgcttctgtgaaccccatcctagacccctggatatatatcctcctgagaaagacagtgctcagtaaagcaatagagaagatcaaatgcctcttctgccgcattggcgggtcccgcagggagcgctccggacagcactgctcagacagtcaaaggacatcttctgccatgtcaggccactctcgctccttcatctcccgggagctgaaggagatcagcagtacatctcagaccctcctgccagacctctcactgccagacctcagtgaaaatggccttggaggcaggaatttgcttccaggtgtgcctggcatgggcctggcccaggaagacaccacctcactgaggactttgcgaatatcagagacctcagactcttcacagggtcaggactcagagagtgtcttactggtggatgaggctggtgggagcggcagggctgggcctgcccctaaggggagctccctgcaagtcacatttcccagtgaaacactgaacttatcagaaaaatgtatataataggcaaggaaagaaatacagtactgtttctggacccttataaaatcctgtgcaatagacacatacatgtcacatttagctgtgctcagaagggctatcatca

SEQ ID NO: 296 - protein, 488 aa, Homo sapiens
MSTPGVNSSASLSPDRLNSPVTIPAVMFIFGVVGNLVAIVVLCKSRKEQKETTFYTLVCGLAVTDLLGTLLVSPVTIATYMKGQWPGGQPLCEYSTFILLFFSLSGLSIICAMSVERYLAINHAYFYSHYVDKRLAGLTLFAVYASNVLFCALPNMGLGSSRLQYPDTWCFIDWTTNVTAHAAYSYMYAGFSSFLILATVLCNVLVCGALLRMHRQFMRRTSLGTEQHHAAAAASVASRGHPAASPALPRLSDFRRRRSFRRIAGAEIQMVILLIATSLVVLICSIPLVVRVFVNQLYQPSLEREVSKNPDLQAIRIASVNPILDPWIYILLRKTVLSKAIEKIKCLFCRIGGSRRERSGQHCSDSQRTSSAMSGHSRSFISRELKEISSTSQTLLPDLSLPDLSENGLGGRNLLPGVPGMGLAQEDTTSLRTLRISETSDSSQGQDSESVLLVDEAGGSGRAGPAPKGSSLQVTFPSETLNLSEKCI

SEQ ID NO: 297 - DNA, 3095 bp, Homo sapiens
ggcgcggggcgccatggcacaccgagcggctccgtcttctgctcctcagagagcccggctggcggcctgggatgacaagatgtctggactgcaatcctgcacagttttgagagggagatgacttgagtggttggcttttatctccacaacaatgtccatgaacaattccaaacagctagtgtctcctgcagctgcgcttctttcaaacacaacctgccagacggaaaaccggctttccgtatttttttcagtaatcttcatgacagtgggaatcttgtcaaacagccttgccatcgccattctcatgaaggcatatcagagatttagacagaagtccaaggcatcgtttctgcttttggccagcggcctggtaatcactgatttctttggccatctcatcaatggagccatagcagtatttgtatatgcttctgataaagaatggatccgctttgaccaatcaaatgtcctttgcagtatttttggtatctgcatggtgttttctggtctgtgcccacttcttctaggcagtgtgatggccattgagcggtgtattggagtcacaaaaccaatatttcattctacgaaaattacatccaaacatgtgaaaatgatgttaagtggtgtgtgcttgtttgctgttttcatagctttgctgcccatccttggacatcgagactataaaattcaggcgtcgaggacctggtgtttctacaacacagaagacatcaaagactgggaagatagattttatcttctacttttttcttttctggggctcttagcccttggtgtttcattgttgtgcaatgcaatcacaggaattacacttttaagagttaaatttaaaagtcagcagcacagacaaggcagatctcatcatttggaaatggtaatccagctcctggcgataatgtgtgtctcctgtatttgttggagcccatttctggttacaatggccaacattggaataaatggaaatcattctctggaaacctgtgaaacaacactttttgctctccgaatggcaacatggaatcaaatcttagatccttgggtatatattcttctacgaaaggctgtccttaagaatctctataagcttgccagtcaatgctgtggagtgcatgtcatcagcttacatatttgggagcttagttccattaaaaattccttaaaggttgctgctatttctgagtcaccagttgcagagaaatcagcaagcacctagcttaataggacagtaaatctgtgtggggctagaacaaaaattaagacatgtttggcaatatttcagttagttaaatacctgtagcctaactggaaaattcaggcttcatcatgtagtttgaagatactattgtcagattcaggttttgaaatttgtcaaataaacaggataactgtacattttcaacttgtttttgccaatgggaggtagacacaataaaataatgccatgggagtcacactgaaagcaattttgagcttatctgtcttatttatgctttgagtgaatcatctgttgaggtctaatgcctctacttggcctatttgccagagaacatcttaatgcagcctgcatagtgaaatggttattttgagatcaccgctctgtagctaacccttataaactaggctcagtaaaataaagcactcttattttttgatctggcctattttgcccctcattgtgtagcctcaattaacacatgcatggtcatgacacccagaattcatgatggtttgttataacaacctctgcatattccaggtctggcagacaggttgcctgaccctgcaatcctatctagaatgggcccattcttgtcacatttgacaaataggactgcctacatttattattatgaaggtcgattgttgttggaagtgttttttcatgtcatagattagcaattttcaaataattattttttctctgaaaattttgtgtgtgattgcacaataaataatttttagagaaacaaaggctctttctcagcacattgatgggcaactagaattacagcagtttcaaactctaccatggataatgcaaacaaaccgaagctacatgccaatgataggtgcaaagaatattggcaaaaggtgctttaccttgagccattatttgtgtcagagaacaaaagaaacagaatcaatatataaattcaaagactatctgcagctagtgtgtttcttctttacacacatatacacacagacatcagaaaattctgttgagagcaggttcattaaatttgtaagatggcatattctaaagcctgtgctaccagtactaagaggggaagactggcaatttgccaagcacttggggattattataacaattaactaggagatcaagagataataatctctccccaaattttccaataataattgagactttttctttgcttgtttgtgtaattcaaccaaaagaatttcaatacccattcaaattgtcctaggtctatcagaaattagggaaggtagtcctgctttataataggaaaatgtatttctgtataagatttctttgctttcattaaaaatgggattcatttaaaaattaatctttccctgttaggctgatttcagattctctaggaaatctggtgaagtaaccagaagactttcagatggtttatttgctttcagcagagaatttatttcatacagttacttaagagtgttgatgtcttgtgaacagagatataaggaaccattctccatccttccttatcatgctgggtacaatgcttctatgaatatttccatgtattttgactggggagaggcatggagaagaaactctcattcaggggctccaggatccttctccttgaggcttctaaataaatggcagaattcttgctgtattgccatgatgtcaccctggccatgtgtactgacttgaggagatcttgcaacatggccatgtgcaaggctttaaggagtgagagagatgtgtacatatcttaggagggttatctatgttatctgagtatatgtttgggtaaccaaattggtcttaaaaatgatgttaacccaagaagtagacatcaaaaattaaaaaaaaaaaaaaaaaa

SEQ ID NO: 298 - protein, 359 aa, Homo sapiens
MSMNNSKQLVSPAAALLSNTTCQTENRLSVFFSVIFMTVGILSNSLAIAILMKAYQRFRQKSKASFLLLASGLVITDFFGHLINGAIAVFVYASDKEWIRFDQSNVLCSIFGICMVFSGLCPLLLGSVMAIERCIGVTKPIFHSTKITSKHVKMMLSGVCLFAVFIALLPILGHRDYKIQASRTWCFYNTEDIKDWEDRFYLLLFSFLGLLALGVSLLCNAITGITLLRVKFKSQQHRQGRSHHLEMVIQLLAIMCVSCICWSPFLVTMANIGINGNHSLETCETTLFALRMATWNQILDPWVYILLRKAVLKNLYKLASQCCGVHVISLHIWELSSIKNSLKVAAISESPVAEKSAST

SEQ ID NO: 299 - DNA, 1451 bp, Homo sapiens
cggcccgccctggggaggcgcgcagcagaggctccgattcggggcaggtgagaggctgactttctctcggtgcgtccagtggagctctgagtttcgaatcggtggcggcggattccccgcgcgcccggcgtcggggcttccaggaggatgcggagccccagcgcggcgtggctgctgggggccgccatcctgctagcagcctctctctcctgcagtggcaccatccaaggaaccaatagatcctctaaaggaagaagccttattggtaaggttgatggcacatcccacgtcactggaaaaggagttacagttgaaacagtcttttctgtggatgagttttctgcatctgtcctcactggaaaactgaccacggtcttccttccaattgtctacacaattgtgtttgtggtgggtttgccaagtaacggcatggccctgtgggtctttcttttccgaactaagaagaagcaccctgctgtgatttacatggccaatctggccttggctgacctcctctctgtcatctggttccccttgaagattgcctatcacatacatgccaacaactggatttatggggaagctctttgtaatgtgcttattggctttttctatggcaacatgtactgttccattctcttcatgacctgcctcagtgtgcagaggtattgggtcatcgtgaaccccatggggcactccaggaagaaggcaaacattgccattggcatctccctggcaatatggctgctgattctgctggtcaccatccctttgtatgtcgtgaagcagaccatcttcattcctgccctgaacatcacgacctgtcatgatgttttgcctgagcagctcttggtgggagacatgttcaattacttcctctctctggccattggggtctttctgttcccagccttcctcacagcctctgcctatgtgctgatgatcagaatgctgcgatcttctgccatggatgaaaactcagagaagaaaaggaagagggccatcaaactcattgtcactgtcctggccatgtacctgatctgcttcactcctagtaaccttctgcttgtggtgcattattttctgattaagagccagggccagagccatgtctatgccctgtacattgtagccctctgcctctctacccttaacagctgcatcgacccctttgtctattactttgtttcacatgatttcagggatcatgcaaagaacgctctcctttgccgaagtgtccgcactgtaaagcagatgcaagtatccctcacctcaaagaaacactccaggaaatccagctcttactcttcaagttcaaccactgttaagacctcctattgagttttccaggtcctcagatgggaattgcacagtaggatgtggaacctgtttaatgttatgaggacgtgtctgttatttcctaatcaaaaaggtctcaccacataccaccg

SEQ ID NO: 300 - protein, 397 aa, Homo sapiens
MRSPSAAWLLGAAILLAASLSCSGTIQGTNRSSKGRSLIGKVDGTSHVTGKGVTVETVFSVDEFSASVLTGKLTTVFLPIVYTIVFVVGLPSNGMALWVFLFRTKKKHPAVIYMANLALADLLSVIWFPLKIAYHIHANNWIYGEALCNVLIGFFYGNMYCSILFMTCLSVQRYWVIVNPMGHSRKKANIAIGISLAIWLLILLVTIPLYVVKQTIFIPALNITTCHDVLPEQLLVGDMFNYFLSLAIGVFLFPAFLTASAYVLMIRMLRSSAMDENSEKKRKRAIKLIVTVLAMYLICFTPSNLLLVVHYFLIKSQGQSHVYALYIVALCLSTLNSCIDPFVYYFVSHDFRDHAKNALLCRSVRTVKQMQVSLTSKKHSRKSSSYSSSSTTVKTSY

SEQ ID NO: 301 - DNA, 1830 bp, Homo sapiens
cctgcctgcacggcacaggagagcaaacttctacagacagaccaaggcttccatttgctgctgacacatggaactgaggtgaaattgtgctccatgattttacagatttcataacgtttaagagacgggactcaggtcatcaaaatgaaagccctcatctttgcagctgctggcctcctgcttctgttgcccactttttgtcagagtggcatggaaaatgatacaaacaacttggcaaagccaaccttacccattaagacctttcgtggagctcccccaaattcttttgaagagttccccttttctgccttggaaggctggacaggagccacgattactgtaaaaattaagtgccctgaagaaagtgcttcacatctccatgtgaaaaatgctaccatggggtacctgaccagctccttaagtactaaactgatacctgccatctacctcctggtgtttgtagttggtgtcccggccaatgctgtgaccctgtggatgcttttcttcaggaccagatccatctgtaccactgtattctacaccaacctggccattgcagattttcttttttgtgttacattgccctttaagatagcttatcatctcaatgggaacaactgggtatttggagaggtcctgtgccgggccaccacagtcatcttctatggcaacatgtactgctccattctgctccttgcctgcatcagcatcaaccgctacctggccatcgtccatcctttcacctaccggggcctgcccaagcacacctatgccttggtaacatgtggactggtgtgggcaacagttttcttatatatgctgccatttttcatactgaagcaggaatattatcttgttcagccagacatcaccacctgccatgatgttcacaacacttgcgagtcctcatctcccttccaactctattacttcatctccttggcattctttggattcttaattccatttgtgcttatcatctactgctatgcagccatcatccggacacttaatgcatacgatcatagatggttgtggtatgttaaggcgagtctcctcatccttgtgatttttaccatttgctttgctccaagcaatattattcttattattcaccatgctaactactactacaacaacactgatggcttatattttatatatctcatagctttgtgcctgggtagtcttaatagttgcttagatccattcctttattttctcatgtcaaaaaccagaaatcactccactgcttaccttacaaaatagtgaaatgatcttagagaacaaggacagccatcacagagaacgtctgttttcaagaacaacataagcatagtgcaaggagctccatttccgagctcctaagaaatatgcttcaaaggtcaaacattacaaaagcattagtagtttgtttgtttgtttttgagactgagtctcactttatcacccagactggcgtgcagtggcactatcttggctcattgcaacctctgcctcccaggtcagcctcccaagtagctgggattacaccaccatgcccagctactaaaaatacttgtatttttagtagagacggggtttcaccatgttgaccaggctggtcttgaactcctgacctcaagtgatcttccggcctcagcctcccaaagtgctggattacaggcgtgagccactgagccagccagcattagtaatttttaaaaacactttatcagtattttaaaaatgttaatgcaggagaaaagatatcacaactctatggaaaatgacatttccatttgccttattgctacttcaagctctttaaatcaccatcttccctatttc

SEQ ID NO: 302 - protein, 374 aa, Homo sapiens
MKALIFAAAGLLLLLPTFCQSGMENDTNNLAKPTLPIKTFRGAPPNSFEEFPFSALEGWTGATITVKIKCPEESASHLHVKNATMGYLTSSLSTKLIPAIYLLVFVVGVPANAVTLWMLFFRTRSICTTVFYTNLAIADFLFCVTLPFKIAYHLNGNNWVFGEVLCRATTVIFYGNMYCSILLLACISINRYLAIVHPFTYRGLPKHTYALVTCGLVWATVFLYMLPFFILKQEYYLVQPDITTCHDVHNTCESSSPFQLYYFISLAFFGFLIPFVLIIYCYAAIIRTLNAYDHRWLWYVKASLLILVIFTICFAPSNIILIIHHANYYYNNTDGLYFIYLIALCLGSLNSCLDPFLYFLMSKTRNHSTAYLTK

SEQ ID NO: 303 - DNA, 2070 bp, Homo sapiens
ccgacacccacgggcggagatcacctgctgccccgcagacccctgtcccttcctcccggaccagcagctagaggatgtccaaacggagttggtgggctggatccagaaagcccccaagagagatgctgaaactctcaggctctgactccagccaaagcatgaatggccttgaagtggctcccccaggtctgatcaccaacttctccctggccacggcagagcaatgtggccaggagacgccactggagaacatgctgttcgcctccttctaccttctggattttatcctggctttagttggcaataccctggctctgtggcttttcatccgagaccacaagtccgggaccccggccaacgtgttcctgatgcatctggccgtggccgacttgtcgtgcgtgctggtcctgcccacccgcctggtctaccacttctctgggaaccactggccatttggggaaatcgcatgccgtctcaccggcttcctcttctacctcaacatgtacgccagcatctacttcctcacctgcatcagcgccgaccgtttcctggccattgtgcacccggtcaagtccctcaagctccgcaggcccctctacgcacacctggcctgtgccttcctgtgggtggtggtggctgtggccatggccccgctgctggtgagcccacagaccgtgcagaccaaccacacggtggtctgcctgcagctgtaccgggagaaggcctcccaccatgccctggtgtccctggcagtggccttcaccttcccgttcatcaccacggtcacctgctacctgctgatcatccgcagcctgcggcagggcctgcgtgtggagaagcgcctcaagaccaaggcagtgcgcatgatcgccatagtgctggccatcttcctggtctgcttcgtgccctaccacgtcaaccgctccgtctacgtgctgcactaccgcagccatggggcctcctgcgccacccagcgcatcctggccctggcaaaccgcatcacctcctgcctcaccagcctcaacggggcactcgaccccatcatgtatttcttcgtggctgagaagttccgccacgccctgtgcaacttgctctgtggcaaaaggctcaagggcccgccccccagcttcgaagggaaaaccaacgagagctcgctgagtgccaagtcagagctgtgagcggggggcgccgtccaggccgagcgcagactgtttaggactcagcagacccagcaagaggcatctgccctttccccagccacctccccagcaagcaacctgaaatctcagcagatgcccaccatttctctagatcgcctagtctcaacccataaaaaggaagaactgacaaaggggatccatcggccacccctctgcaggggcttgtgatggctacaatggctcctagacactcaacgacttcatctgtggcagggagagaggaggccggaagaacaacccctgaacaatggaggcctttctttcccgctaggctcccagcctccttcccgctacagaatcgctcatcggcgaggctcagcagaaagaccctgaaggcaggctgcaaatgacccagaagagggacctgggagtcctggtggggacggggagggagtctcaatactcctttgcagcgcaaggtactctgagtcccctctgtagtgcctctgccagacacacactgcctgagttgaagagacacaggccacacatttcaggctggttgccagcggacgtcagcactcacggcctgcggggactcagcacagctctggattctggatctctcctgctgtaaccccacgcacaagcctgcaacccccagagctctttgacaggctcccaggcctcccagtcctggacaagcatgtgcagtcacgggagctcagctcaggccagggctgggctgtgcacctgcctcccactgacccagacccacttcctccagagaggcctctctccgcctgagctatttcccttgctagtgtgcagatatttccctaacatgtccttttttgtatttgtttgtacggaccataaatataactgtagctttaagactaaaaaaaaa

SEQ ID NO: 304 - protein, 367 aa, Homo sapiens
MSKRSWWAGSRKPPREMLKLSGSDSSQSMNGLEVAPPGLITNFSLATAEQCGQETPLENMLFASFYLLDFILALVGNTLALWLFIRDHKSGTPANVFLMHLAVADLSCVLVLPTRLVYHFSGNHWPFGEIACRLTGFLFYLNMYASIYFLTCISADRFLAIVHPVKSLKLRRPLYAHLACAFLWVVVAVAMAPLLVSPQTVQTNHTVVCLQLYREKASHHALVSLAVAFTFPFITTVTCYLLIIRSLRQGLRVEKRLKTKAVRMIAIVLAIFLVCFVPYHVNRSVYVLHYRSHGASCATQRILALANRITSCLTSLNGALDPIMYFFVAEKFRHALCNLLCGKRLKGPPPSFEGKTNESSLSAKSEL

SEQ ID NO: 305 - DNA, 2767 bp, Homo sapiens
agagtcatccagctggagccctgagtggctgagctcaggccttcgcagcattcttgggtgggagcagccacgggtcagccacaagggccacagccatgaatggcacagaaggccctaacttctacgtgcccttctccaatgcgacgggtgtggtacgcagccccttcgagtacccacagtactacctggctgagccatggcagttctccatgctggccgcctacatgtttctgctgatcgtgctgggcttccccatcaacttcctcacgctctacgtcaccgtccagcacaagaagctgcgcacgcctctcaactacatcctgctcaacctagccgtggctgacctcttcatggtcctaggtggcttcaccagcaccctctacacctctctgcatggatacttcgtcttcgggcccacaggatgcaatttggagggcttctttgccaccctgggcggtgaaattgccctgtggtccttggtggtcctggccatcgagcggtacgtggtggtgtgtaagcccatgagcaacttccgcttcggggagaaccatgccatcatgggcgttgccttcacctgggtcatggcgctggcctgcgccgcacccccactcgccggctggtccaggtacatccccgagggcctgcagtgctcgtgtggaatcgactactacacgctcaagccggaggtcaacaacgagtcttttgtcatctacatgttcgtggtccacttcaccatccccatgattatcatctttttctgctatgggcagctcgtcttcaccgtcaaggaggccgctgcccagcagcaggagtcagccaccacacagaaggcagagaaggaggtcacccgcatggtcatcatcatggtcatcgctttcctgatctgctgggtgccctacgccagcgtggcattctacatcttcacccaccagggctccaacttcggtcccatcttcatgaccatcccagcgttctttgccaagagcgccgccatctacaaccctgtcatctatatcatgatgaacaagcagttccggaactgcatgctcaccaccatctgctgcggcaagaacccactgggtgacgatgaggcctctgctaccgtgtccaagacggagacgagccaggtggccccggcctaagacctgcctaggactctgtggccgactataggcgtctcccatcccctacaccttcccccagccacagccatcccaccaggagcagcgcctgtgcagaatgaacgaagtcacataggctccttaattttttttttttttttaagaaataattaatgaggctcctcactcacctgggacagcctgagaagggacatccaccaagacctactgatctggagtcccacgttccccaaggccagcgggatgtgtgcccctcctcctcccaactcatctttcaggaacacgaggattcttgctttctggaaaagtgtcccagcttagggataagtgtctagcacagaatggggcacacagtaggtgcttaataaatgctggatggatgcaggaaggaatggaggaatgaatgggaagggagaacatatctatcctctcagaccctcgcagcagcagcaactcatacttggctaatgatatggagcagttgtttttccctccctgggcctcactttcttctcctataaaatggaaatcccagatccctggtcctgccgacacgcagctactgagaagaccaaaagaggtgtgtgtgtgtctatgtgtgtgtttcagcactttgtaaatagcaagaagctgtacagattctagttaatgttgtgaataacatcaattaatgtaactagttaattactatgattatcacctcctgatagtgaacattttgagattgggcattcagatgatggggtttcacccaaccttggggcaggtttttaaaaattagctaggcatcaaggccagaccagggctgggggttgggctgtaggcagggacagtcacaggaatgcaggatgcagtcatcagacctgaaaaaacaacactgggggagggggacggtgaaggccaagttcccaatgagggtgagattgggcctggggtctcacccctagtgtggggccccaggtcccgtgcctccccttcccaatgtggcctatggagagacaggcctttctctcagcctctggaagccacctgctcttttgctctagcacctgggtcccagcatctagagcatggagcctctagaagccatgctcacccgcccacatttaattaacagctgagtccctgatgtcatccttactcgaagagcttagaaacaaagagtgggaaattccactgggcctaccttccttggggatgttcatgggccccagtttccagtttcccttgccagacaagcccatcttcagcagttgctagtccattctccattctggagaatctgctccaaaaagctggccacatctctgaggtgtcagaattaagctgcctcagtaactgctcccccttctccatataagcaaagccagaagctctagctttacccagctctgcctggagactaaggcaaattgggccattaaaagctcagctcctatgttggtattaacggtggtgggttttgttgctttcacactctatccacaggatagattgaaactgccagcttccacctgatccctgaccctgggatggctggattgagcaatgagcagagccaagcagcacagagtcccctggggctagaggtggaggaggcagtcctgggaatgggaaaaacccca

SEQ ID NO: 306 - protein, 348 aa, Homo sapiens [sequence omitted]

SEQ ID NO: 307 - DNA, 1415 bp, Homo sapiens
agagacagctgggccactggcagtgagggagagtgaggatggcagagaccagtgccctgcccactggcttcggggagctcgaggtgctggctgtggggatggtgctactggtggaagctctctccggtctcagcctcaataccctgaccatcttctctttctgcaagaccccggagctgcggactccctgccacctactggtgctgagcttggctcttgcggacagtgggatcagcctgaatgccctcgttgcagccacatccagccttctccggcgctggccctacggctcggacggctgccaggctcacggcttccagggctttgtgacagcgttggccagcatctgcagcagtgcagccatcgcatgggggcgttatcaccactactgcacccgtagccagctggcctggaactcagccgtctctctggtgctcttcgtgtggctgtcttctgccttctgggcagctctgccccttctgggttggggtcactatgactatgagccactggggacatgctgcaccctggactactccaagggggacagaaacttcaccagcttcctcttcaccatgtccttcttcaacttcgccatgcccctcttcatcacgatcacttcctacagtctcatggagcagaaactggggaagagtggccatctccaggtaaacaccactctgccagcaaggacgctgctgctcggctggggcccctatgccatcctgtatctatacgcagtcatcgcagacgtgacttccatctcccccaaactgcagatggtgcccgccctcattgccaaaatggtgcccacgatcaatgccatcaactatgccctgggcaatgagatggtctgcaggggaatctggcagtgcctctcaccgcagaagagggagaaggaccgaaccaagtgagcctgccaccctggagtgagccccaggccaggaggctgttccaggagtcctgcccagcagcctcggtggccaagcccagacactcacccaccttccccagtggccccgtggatcctggtcctaggctggacacaggattcagaaagacaccaggctgcacagaaagagccagatggacctgagtgtcggtcacagccccctacactcaaggctgagaggcctcaggaaagtcattcctttttaaaaataataataaatgtaagggggtacagtgcagttttgttacatggatagattgcctagtggtgaagtctgggcttttagtgtaaccatcaccctaataatatacgttgtacccattaagttatttctcatccctcaccccctcccaccttgtcacccttctgagtctccaatgtctattattccacactccatgtccacgtgtacacattatttagctcccacttacaagtgagaacatgtggtatttgactttca

SEQ ID NO: 308 - protein, 291 aa, Homo sapiens
MAETSALPTGFGELEVLAVGMVLLVEALSGLSLNTLTIFSFCKTPELRTPCHLLVLSLALADSGISLNALVAATSSLLRRWPYGSDGCQAHGFQGFVTALASICSSAAIAWGRYHHYCTRSQLAWNSAVSLVLFVWLSSAFWAALPLLGWGHYDYEPLGTCCTLDYSKGDRNFTSFLFTMSFFNFAMPLFITITSYSLMEQKLGKSGHLQVNTTLPARTLLLGWGPYAILYLYAVIADVTSISPKLQMVPALIAKMVPTINAINYALGNEMVCRGIWQCLSPQKREKDRTK

SEQ ID NO: 309 - DNA, 1703 bp, Homo sapiens
acgaggccggccggagcccgggaccctgcgcggggcgctgagctcccgagcgggcagagggcacgggcaggcggacgtcggggcgccctcggggaacgtgcgggcaccatgcgtccccacctgtcgccgccgctgcagcagctactactgccggtgctgctcgcctgcgccgcgcactcgactggagcccttccccgactatgtgacgtgctacaagtgctgtgggaagagcaagaccagtgcctgcaggaactctccagagagcagacaggagacctgggcacggagcagccagtgccaggttgtgaggggatgtgggacaacataagctgctggccctcttctgtgccgggccggatggtggaggtggaatgcccgagattcctccggatgctcaccagcagaaatggttccttgttccgaaactgcacacaggatggctggtcagaaaccttccccaggcctaatctggcctgtggcgttaatgtgaacgactcttccaacgagaagcggcactcctacctgctgaagctgaaagtcatgtacaccgtgggctacagctcctccctggtcatgctcctggtcgcccttggcatcctctgtgctttccggaggctccactgcactcgcaactacatccacatgcacctgttcgtgtccttcatccttcgtgccctgtccaacttcatcaaggacgccgtgctcttctcctcagatgatgtcacctactgcgatccgcacagggcgggctgcaagctggtcatggtgctgttccagtactgcatcatggccaactactcctggctgctggtggaaggcctctaccttcacacactcctcgccatctccttcttctctgaaagaaagtacctccagggatttgtggcattcggatggggttctccagccatttttgttgctttgtgggctattgccagacactttctggaagatgttgggtgctgggacatcaatgccaacgcatccatctggtggatcattcgtggtcctgtgatcctctccatcctgattaatttcatccttttcataaacattctaagaatcctgatgagaaaacttagaacccaagaaacaagaggaaatgaagtcagccattataagcgcctggccaggtccactctcctgctgatccccctctttggcatccactacatcgtcttcgccttctccccagaggacgctatggagatccagctgttttttgaactagcccttggctcattccagggactggtggtggccgtcctctactgcttcctcaatggggaggtgcagctggaggttcagaagaagtggcagcaatggcacctccgtgagttcccactgcaccccgtggcctccttcagcaacagcaccaaggccagccacttggagcagagccagggcacctgcaggaccagcatcatctgagaggctggagcagggtcacccacggacagagaccaagagaggtcctgcgaaggctgggcactgctgtgggacagccagtcttcccagcagacaccctgtgtcctccttcagctgaagatgcccctccccaggccttggactcttccgaagggatgtgaggcactgtggggcaggacaagggcctgggatttggttcgtttgctcttctgggaagagaagttcaggggtcccagaaagggacagggaaataaatggtgcctgggatgagattc

SEQ ID NO: 310 - protein, 440 aa, Homo sapiens
MRPHLSPPLQQLLLPVLLACAAHSTGALPRLCDVLQVLWEEQDQCLQELSREQTGDLGTEQPVPGCEGMWDNISCWPSSVPGRMVEVECPRFLRMLTSRNGSLFRNCTQDGWSETFPRPNLACGVNVNDSSNEKRHSYLLKLKVMYTVGYSSSLVMLLVALGILCAFRRLHCTRNYIHMHLFVSFILRALSNFIKDAVLFSSDDVTYCDPHRAGCKLVMVLFQYCIMANYSWLLVEGLYLHTLLAISFFSERKYLQGFVAFGWGSPAIFVALWAIARHFLEDVGCWDINANASIWWIIRGPVILSILINFILFINILRILMRKLRTQETRGNEVSHYKRLARSTLLLIPLFGIHYIVFAFSPEDAMEIQLFFELALGSFQGLVVAVLYCFLNGEVQLEVQKKWQQWHLREFPLHPVASFSNSTKASHLEQSQGTCRTSII

SEQ ID NO: 311 - DNA, 1176 bp, Homo sapiens
atgttccccaatggcaccgcctcctctccttcctcctctcctagccccagcccgggcagctgcggcgaaggcggcggcagcaggggccccggggccggcgctgcggacggcatggaggagccagggcgaaatgcgtcccagaacgggaccttgagcgagggccagggcagcgccatcctgatctctttcatctactccgtggtgtgcctggtggggctgtgtgggaactctatggtcatctacgtgatcctgcgctatgccaagatgaagacggccaccaacatctacatcctaaatctggccattgctgatgagctgctcatgctcagcgtgcccttcctagtcacctccacgttgttgcgccactggcccttcggtgcgctgctctgccgcctcgtgctcagcgtggacgcggtcaacatgttcaccagcatctactgtctgactgtgctcagcgtggaccgctacgtggccgtggtgcatcccatcaaggcggcccgctaccgccggcccaccgtggccaaggtagtaaacctgggcgtgtgggtgctatcgctgctcgtcatcctgcccatcgtggtcttctctcgcaccgcggccaacagcgacggcacggtggcttgcaacatgctcatgccagagcccgctcaacgctggctggtgggcttcgtgttgtacacatttctcatgggcttcctgctgcccgtgggggctatctgcctgtgctacgtgctcatcattgctaagatgcgcatggtggccctcaaggccggctggcagcagcgcaagcgctcggagcgcaagatcaccttaatggtgatgatggtggtgatggtgtttgtcatctgctggatgcctttctacgtggtgcagctggttaacgtgtttgctgagcaggacgacgccacggtgagtcagctgtcggtcatcctcggctatgccaacagctgcgccaaccccatcctctatggctttctctcagacaacttcaagcgctctttccaacgcatcctatgcctcagctggatggacaacgccgcggaggagccggttgactattacgccaccgcgctcaagagccgtgcctacagtgtggaagacttccaacctgagaacctggagtccggcggcgtcttccgtaatggcacctgcacgtcccggatcacgacgctctga

SEQ ID NO: 312 - protein, 391 aa, Homo sapiens
MFPNGTASSPSSSPSPSPGSCGEGGGSRGPGAGAADGMEEPGRNASQNGTLSEGQGSAILISFIYSVVCLVGLCGNSMVIYVILRYAKMKTATNIYILNLAIADELLMLSVPFLVTSTLLRHWPFGALLCRLVLSVDAVNMFTSIYCLTVLSVDRYVAVVHPIKAARYRRPTVAKVVNLGVWVLSLLVILPIVVFSRTAANSDGTVACNMLMPEPAQRWLVGFVLYTFLMGFLLPVGAICLCYVLIIAKMRMVALKAGWQQRKRSERKITLMVMMVVMVFVICWMPFYVVQLVNVFAEQDDATVSQLSVILGYANSCANPILYGFLSDNFKRSFQRILCLSWMDNAAEEPVDYYATALKSRAYSVEDFQPENLESGGVFRNGTCTSRITTL

SEQ ID NO: 313 - DNA, 1110 bp, Homo sapiens
atggacatggcggatgagccactcaatggaagccacacatggctatccattccatttgacctcaatggctctgtggtgtcaaccaacacctcaaaccagacagagccgtactatgacctgacaagcaatgcagtcctcacattcatctattttgtggtctgcatcattgggttgtgtggcaacacacttgtcatttatgtcatcctccgctatgccaagatgaagaccatcaccaacatttacatcctcaacctggccatcgcagatgagctcttcatgctgggtctgcctttcttggctatgcaggtggctctggtccactggccctttggcaaggccatttgccgggtggtcatgactgtggatggcatcaatcagttcaccagcatcttctgcctgacagtcatgagcatcgaccgatacctggctgtggtccaccccatcaagtcggccaagtggaggagaccccggacggccaagatgatcaccatggctgtgtggggagtctctctgctggtcatcttgcccatcatgatatatgctgggctccggagcaaccagtgggggagaagcagctgcaccatcaactggccaggtgaatctggggcttggtacacagggttcatcatctacactttcattctggggttcctggtacccctcaccatcatctgtctttgctacctgttcattatcatcaaggtgaagtcctctggaatccgagtgggctcctctaagaggaagaagtctgagaagaaggtcacccgaatggtgtccatcgtggtggctgtcttcatcttctgctggcttcccttctacatattcaacgtttcttccgtctccatggccatcagccccaccccagcccttaaaggcatgtttgactttgtggtggtcctcacctatgctaacagctgtgccaaccctatcctatatgccttcttgtctgacaacttcaagaagagcttccagaatgtcctctgcttggtcaaggtgagcggcacagatgatggggagcggagtgacagtaagcaggacaaatcccggctgaatgagaccacggagacccagaggaccctcctcaatggagacctccaaaccagtatctga

SEQ ID NO: 314 - protein, 369 aa, Homo sapiens
MDMADEPLNGSHTWLSIPFDLNGSVVSTNTSNQTEPYYDLTSNAVLTFIYFVVCIIGLCGNTLVIYVILRYAKMKTITNIYILNLAIADELFMLGLPFLAMQVALVHWPFGKAICRVVMTVDGINQFTSIFCLTVMSIDRYLAVVHPIKSAKWRRPRTAKMITMAVWGVSLLVILPIMIYAGLRSNQWGRSSCTINWPGESGAWYTGFIIYTFILGFLVPLTIICLCYLFIIIKVKSSGIRVGSSKRKKSEKKVTRMVSIVVAVFIFCWLPFYIFNVSSVSMAISPTPALKGMFDFVVVLTYANSCANPILYAFLSDNFKKSFQNVLCLVKVSGTDDGERSDSKQDKSRLNETTETQRTLLNGDLQTSI

SEQ ID NO: 315 - DNA, 1257 bp, Homo sapiens
atggacatgcttcatccatcatcggtgtccacgacctcagaacctgagaatgcctcctcggcctggcccccagatgccaccctgggcaacgtgtcggcgggcccaagcccggcagggctggccgtcagtggcgttctgatccccctggtctacctggtggtgtgcgtggtgggcctgctgggtaactcgctggtcatctatgtggtcctgcggcacacggccagcccttcagtcaccaacgtctacatcctcaacctggcgctggccgacgagctcttcatgctggggctgcccttcctggccgcccagaacgccctgtcctactggcccttcggctccctcatgtgccgcctggtcatggcggtggatggcatcaaccagttcaccagcatattctgcctgactgtcatgagcgtggaccgctacctggccgtggtacatcccacccgctcggcccgctggcgcacagctccggtggcccgcacggtcagcgcggctgtgtgggtggcctcagccgtggtggtgctgcccgtggtggtcttctcgggagtgccccgcggcatgagcacctgccacatgcagtggcccgagccggcggcggcctggcgagccggcttcatcatctacacggccgcactgggcttcttcgggccgctgctggtcatctgcctctgctacctgctcatcgtggtgaaggtgcgctcagctgggcgccgggtgtgggcaccctcgtgccagcggcgccggcgctccgaacgcagggtcacgcgcatggtggtggccgtggtggcgctcttcgtgctctgctggatgcccttctacgtgctcaacatcgtcaacgtggtgtgcccactgcccgaggagcctgccttctttgggctctacttcctggtggtggcgctgccctatgccaacagctgtgccaaccccatcctttatggcttcctctcctaccgcttcaagcagggcttccgcagggtcctgctgcggccctcccgccgtgtgcgcagccaggagcccactgtggggcccccggagaagactgaggaggaggatgaggaggaggaggatggggaggagagcagggaggggggcaaggggaaggagatgaacggccgggtcagccagatcacgcagcctggcaccagcgggcaggagcggccgcccagcagagtggccagcaaggagcagcagctcctaccccaagaggcttccactggggagaagtccagcacgatgcgcatcagctacctgtag

SEQ ID NO: 316 - protein, 418 aa, Homo sapiens
MDMLHPSSVSTTSEPENASSAWPPDATLGNVSAGPSPAGLAVSGVLIPLVYLVVCVVGLLGNSLVIYVVLRHTASPSVTNVYILNLALADELFMLGLPFLAAQNALSYWPFGSLMCRLVMAVDGINQFTSIFCLTVMSVDRYLAVVHPTRSARWRTAPVARTVSAAVWVASAVVVLPVVVFSGVPRGMSTCHMQWPEPAAAWRAGFIIYTAALGFFGPLLVICLCYLLIVVKVRSAGRRVWAPSCQRRRRSERRVTRMVVAVVALFVLCWMPFYVLNIVNVVCPLPEEPAFFGLYFLVVALPYANSCANPILYGFLSYRFKQGFRRVLLRPSRRVRSQEPTVGPPEKTEEEDEEEEDGEESREGGKGKEMNGRVSQITQPGTSGQERPPSRVASKEQQLLPQEASTGEKSSTMRISYL

SEQ ID NO: 317 - DNA, 1167 bp, Homo sapiens
atgagcgccccctcgacgctgccccccgggggcgaggaagggctggggacggcctggccctctgcagccaatgccagtagcgctccggcggaggcggaggaggcggtggcggggcccggggacgcgcgggcggcgggcatggtcgctatccagtgcatctacgcgctggtgtgcctggtggggctggtgggcaacgccctggtcatcttcgtgatccttcgctacgccaagatgaagacggctaccaccatctacctgctcaacctggccgtagccgacgagctcttcatgctgagcgtgcccttcgtggcctcgtcggccgccctgcgccactggcccttcggctccgtgctgtgccgcgcggtgctcagcgtcgacggcctcaacatgttcaccagcgtcttctgtctcaccgtgctcagcgtggaccgctacgtggccgtggtgcaccctctgcgcgcggcgacctaccggcggcccagcgtggccaagctcatcaacctgggcgtgtggctggcatccctgttggtcactctccccatcgccatcttcgcagacaccagaccggctcgcggcggccaggccgtggcctgcaacctgcagtggccacacccggcctggtcggcagtcttcgtggtctacactttcctgctgggcttcctgctgcccgtgctggccattggcctgtgctacctgctcatcgtgggcaagatgcgcgccgtggccctgcgcgctggctggcagcagcgcaggcgctcggagaagaaaatcaccaggctggtgctgatggtcgtggtcgtctttgtgctctgctggatgcctttctacgtggtgcagctgctgaacctcgtcgtgaccagccttgatgccaccgtcaaccacgtgtcccttatcctcagctatgccaacagctgcgccaaccctattctctatggcttcctctccgacaacttccgccgatccttccagcgggttctctgcctgcgctgctgcctcctggaaggtgctggaggtgctgaggaggagcccctggactactatgccactgctctcaagagcaaaggtggggcagggtgcatgtgccccccactaaaatgccagcaggaagccctgcaaccagaacccggccgcaagcgcatccccctcaccaggaccaccaccttctga

SEQ ID NO: 318 - protein, 388 aa, Homo sapiens
MSAPSTLPPGGEEGLGTAWPSAANASSAPAEAEEAVAGPGDARAAGMVAIQCIYALVCLVGLVGNALVIFVILRYAKMKTATTIYLLNLAVADELFMLSVPFVASSAALRHWPFGSVLCRAVLSVDGLNMFTSVFCLTVLSVDRYVAVVHPLRAATYRRPSVAKLINLGVWLASLLVTLPIAIFADTRPARGGQAVACNLQWPHPAWSAVFVVYTFLLGFLLPVLAIGLCYLLIVGKMRAVALRAGWQQRRRSEKKITRLVLMVVVVFVLCWMPFYVVQLLNLVVTSLDATVNHVSLILSYANSCANPILYGFLSDNFRRSFQRVLCLRCCLLEGAGGAEEEPLDYYATALKSKGGAGCMCPPLKCQQEALQPEPGRKRIPLTRTTTF

SEQ ID NO: 319 - DNA, 1095 bp, Homo sapiens
atggagcccctgttcccagcctccacgcccagctggaacgcctcctccccgggggctgcctctggaggcggtgacaacaggacgctggtggggccggcgccctcggcaggggcccgggcggtgctggtgcccgtgctgtacctgctggtgtgtgcggccgggctgggcgggaacacgctggtcatctacgtggtgctgcgcttcgccaagatgaagaccgtcaccaacatctacattctcaacctggcagtggccgacgtcctgtacatgctggggctgcctttcctggccacgcagaacgccgcgtccttctggcccttcggccccgtcctgtgccgcctggtcatgacgctggacggcgtcaaccagttcaccagtgtcttctgcctgacagtcatgagcgtggaccgctacctggcagtggtgcacccgctgagctcggcccgctggcgccgcccgcgtgtggccaagctggcgagcgccgcggcctgggtcctgtctctgtgcatgtcgctgccgctcctggtgttcgcggacgtgcaggagggcggtacctgcaacgccagctggccggagcccgtggggctgtggggcgccgtcttcatcatctacacggccgtgctgggcttcttcgcgccgctgctggtcatctgcctgtgctacctgctcatcgtggtgaaggtgagggcggcgggcgtgcgcgtgggctgcgtgcggcggcgctcggagcggaaggtgacgcgcatggtgttggtggtggtgctggtgtttgcgggatgttggctgcccttcttcaccgtcaacatcgtcaacctggccgtggcgctgccccaggagcccgcctccgccggcctctacttcttcgtggtcatcctctcctacgccaacagctgtgccaaccccgtcctctacggcttcctctctgacaacttccgccagagcttccagaaggttctgtgcctccgcaagggctctggtgccaaggacgctgacgccacggagccgcgtccagacaggatccggcagcagcaggaggccacgccgcccgcgcaccgcgccgcagccaacgggcttatgcagaccagcaagctgtga

SEQ ID NO: 320 - protein, 364 aa, Homo sapiens
MEPLFPASTPSWNASSPGAASGGGDNRTLVGPAPSAGARAVLVPVLYLLVCAAGLGGNTLVIYVVLRFAKMKTVTNIYILNLAVADVLYMLGLPFLATQNAASFWPFGPVLCRLVMTLDGVNQFTSVFCLTVMSVDRYLAVVHPLSSARWRRPRVAKLASAAAWVLSLCMSLPLLVFADVQEGGTCNASWPEPVGLWGAVFIIYTAVLGFFAPLLVICLCYLLIVVKVRAAGVRVGCVRRRSERKVTRMVLVVVLVFAGCWLPFFTVNIVNLAVALPQEPASAGLYFFVVILSYANSCANPVLYGFLSDNFRQSFQKVLCLRKGSGAKDADATEPRPDRIRQQQEATPPAHRAAANGLMQTSKL

SEQ ID NO: 321 - DNA, 1766 bp, Homo sapiens
aattcagagccaccgcgggcaggcgggcagtgcatccagaagcgtttatattctgagcgccagttcagctttcaaaaagagtgctgcccataaaaagccttccaccctcctgtctgctttagaaggaccctgagccccaggcgccagccacaggactctgctgcagaggggggttgtgtacagatagtaggctttacgcctagcttcgaaatggataacgtcctcccggtggactcagacctctccccaaacatctccactaacacctcggaacccaatcagttcgtgcaaccagcctggcaaattgtcctttgggcagctgcctacacggtcattgtggtgacctctgtggtgggcaacgtggtagtgatgtggatcatcttagcccacaaaagaatgaggacagtgacgaactattttctggtgaacctggccttcgcggaggcctccatggctgcattcaatacagtggtgaacttcacctatgctgtccacaacgaatggtactacggcctgttctactgcaagttccacaacttctttcccatcgccgctgtcttcgccagtatctactccatgacggctgtggcctttgataggtacatggccatcatacatcccctccagccccggctgtcagccacagccaccaaagtggtcatctgtgtcatctgggtcctggctctcctgctggccttcccccagggctactactcaaccacagagaccatgcccagcagagtcgtgtgcatgatcgaatggccagagcatccgaacaagatttatgagaaagtgtaccacatctgtgtgactgtgctgatctacttcctccccctgctggtgattggctatgcatacaccgtagtgggaatcacactatgggccagtgagatccccggggactcctctgaccgctaccacgagcaagtctctgccaagcgcaaggtggtcaaaatgatgattgtcgtggtgtgcaccttcgccatctgctggctgcccttccacatcttcttcctcctgccctacatcaacccagatctctacctgaagaagtttatccagcaggtctacctggccatcatgtggctggccatgagctccaccatgtacaaccccatcatctactgctgcctcaatgacaggttccgtctgggcttcaagcatgccttccggtgctgccccttcatcagcgccggcgactatgaggggctggaaatgaaatccacccggtatctccagacccagggcagtgtgtacaaagtcagccgcctggagaccaccatctccacagtggtgggggcccacgaggaggagccagaggacggccccaaggccacaccctcgtccctggacctgacctccaactgctcttcacgaagtgactccaagaccatgacagagagcttcagcttctcctccaatgtgctctcctaggccacagggcctttggcaggtgcagcccccactgcctttgacctgcctcccttcatgcatggaaattcccttcatctggaaccatcagaaacaccctcacactgggacttgcaaaaagggtcagtatgggttagggaaaacattccatccttgagtcaaaaaatctcaattcttccctatctttgccaccctcatgctgtgtgactcaaaccaaatcactgaactttgctgagcctgtaaaataaaaggtcggaccagcttttcctcaagagcccaatgcattccatttctggaagtgactttggctgcatgcgagtgctcatttcaggatg

SEQ ID NO: 322 - protein, 407 aa, Homo sapiens
MDNVLPVDSDLSPNISTNTSEPNQFVQPAWQIVLWAAAYTVIVVTSVVGNVVVMWIILAHKRMRTVTNYFLVNLAFAEASMAAFNTVVNFTYAVHNEWYYGLFYCKFHNFFPIAAVFASIYSMTAVAFDRYMAIIHPLQPRLSATATKVVICVIWVLALLLAFPQGYYSTTETMPSRVVCMIEWPEHPNKIYEKVYHICVTVLIYFLPLLVIGYAYTVVGITLWASEIPGDSSDRYHEQVSAKRKVVKMMIVVVCTFAICWLPFHIFFLLPYINPDLYLKKFIQQVYLAIMWLAMSSTMYNPIIYCCLNDRFRLGFKHAFRCCPFISAGDYEGLEMKSTRYLQTQGSVYKVSRLETTISTVVGAHEEEPEDGPKATPSSLDLTSNCSSRSDSKTMTESFSFSSNVLS

SEQ ID NO: 323 - DNA, 3592 bp, Homo sapiens
ggcggggggcgcacagagccagaggggcttgcgagcggcggctgagggaccgcggggagggggcgccgagcggctccagcgcagagactctcactgcacgccggaggccccttcctcgctccgcccgcgcgaccgcgcgccccagtcccgccccgccccgctaaccgccccagacacagcgctcgccgagggtcgcttggaccctgatcttacccgtgggcaccctgcgctctgcctgccgcgaagaccggctccccgacccgcagaagtcaggagagagggtgaagcggagcagcccgaggcggggcagcctcccggagcagcgccgcgcagagcccgggacaatggggccgcggcggctgctgctggtggccgcctgcttcagtctgtgcggcccgctgttgtctgcccgcacccgggcccgcaggccagaatcaaaagcaacaaatgccaccttagatccccggtcatttcttctcaggaaccccaatgataaatatgaaccattttgggaggatgaggagaaaaatgaaagtgggttaactgaatacagattagtctccatcaataaaagcagtcctcttcaaaaacaacttcctgcattcatctcagaagatgcctccggatatttgaccagctcctggctgacactctttgtcccatctgtgtacaccggagtgtttgtagtcagcctcccactaaacatcatggccatcgttgtgttcatcctgaaaatgaaggtcaagaagccggcggtggtgtacatgctgcacctggccacggcagatgtgctgtttgtgtctgtgctcccctttaagatcagctattacttttccggcagtgattggcagtttgggtctgaattgtgtcgcttcgtcactgcagcattttactgtaacatgtacgcctctatcttgctcatgacagtcataagcattgaccggtttctggctgtggtgtatcccatgcagtccctctcctggcgtactctgggaagggcttccttcacttgtctggccatctgggctttggccatcgcaggggtagtgcctctcgtcctcaaggagcaaaccatccaggtgcccgggctcaacatcactacctgtcatgatgtgctcaatgaaaccctgctcgaaggctactatgcctactacttctcagccttctctgctgtcttcttttttgtgccgctgatcatttccacggtctgttatgtgtctatcattcgatgtcttagctcttccgcagttgccaaccgcagcaagaagtcccgggctttgttcctgtcagctgctgttttctgcatcttcatcatttgcttcggacccacaaacgtcctcctgattgcgcattactcattcctttctcacacttccaccacagaggctgcctactttgcctacctcctctgtgtctgtgtcagcagcataagctcgtgcatcgaccccctaatttactattacgcttcctctgagtgccagaggtacgtctacagtatcttatgctgcaaagaaagttccgatcccagcagttataacagcagtgggcagttgatggcaagtaaaatggatacctgctctagtaacctgaataacagcatatacaaaaagctgttaacttaggaaaagggactgctgggaggttaaaaagaaaagtttataaaagtgaataacctgaggattctattagtccccacccaaactttattgattcacctcctaaaacaacagatgtacgacttgcatacctgctttttatgggagctgtcaagcatgtatttttgtcaattaccagaaagataacaggacgagatgacggtgttattccaagggaatattgccaatgctacagtaataaatgaatgtcacttctggatatagctaggtgacatatacatacttacatgtgtgtatatgtagatgtatgcacacacatatattatttgcagtgcagtatagaataggcactttaaaacactctttccccgcaccccagcaattatgaaaataatctctgattccctgatttaatatgcaaagtctaggttggtagagtttagccctgaacatttcatggtgttcatcaacagtgagagactccatagtttgggcttgtaccacttttgcaaataagtgtattttgaaattgtttgacggcaaggtttaagttattaagaggtaagacttagtactatctgtgcgtagaagttctagtgttttcaattttaaacatatccaagtttgaattcctaaaattatggaaacagatgaaaagcctctgttttgatatgggtagtattttttacattttacacactgtacacataagccaaaactgagcataagtcctctagtgaatgtaggctggctttcagagtaggctattcctgagagctgcatgtgtccgcccccgatggaggactccaggcagcagacacatgccagggccatgtcagacacagattggccagaaaccttcctgctgagcctcacagcagtgagactggggccactacatttgctccatcctcctgggattggctgtgaactgatcatgtttatgagaaactggcaaagcagaatgtgatatcctaggaggtaatgaccatgaaagacttctctacccatcttaaaaacaacgaaagaaggcatggacttctggatgcccatccactgggtgtaaacacatctagtagttgttctgaaatgtcagttctgatatggaagcacccattatgcgctgtggccactccaataggtgctgagtgtacagagtggaataagacagagacctgccctcaagagcaaagtagatcatgcatagagtgtgatgtatgtgtaataaatatgtttcacacaaacaaggcctgtcagctaaagaagtttgaacatttgggttactatttcttgtggttataacttaatgaaaacaatgcagtacaggacatatattttttaaaataagtctgatttaattgggcactatttatttacaaatgttttgctcaatagattgctcaaatcaggttttcttttaagaatcaatcatgtcagtctgcttagaaataacagaagaaaatagaattgacattgaaatctaggaaaattattctataatttccatttacttaagacttaatgagactttaaaagcattttttaacctcctaagtatcaagtatagaaaatcttcatggaattcacaaagtaatttggaaattaggttgaaacatatctcttatcttacgaaaaaatggtagcattttaaacaaaatagaaagttgcaaggcaaatgtttatttaaaagagcaggccaggcgcggtggctcacgcctgtaatcccagcactttgggaggctgaggcgggtggatcacgaggtcaggagatcgagaccatcctggctaacacggtgaaacccgtctctactaaaaatgcaaaaaaaattagccgggcgtggtggcaggcacctgtagtcccagctactcgggaggctgaggcaggagactggcgtgaacccaggaggcggaccttgtagtgagccgagatcgcgccactgtgctccagcctgggcaacagagcaagactccatctc

SEQ ID NO: 324 - protein, 425 aa, Homo sapiens
MGPRRLLLVAACFSLCGPLLSARTRARRPESKATNATLDPRSFLLRNPNDKYEPFWEDEEKNESGLTEYRLVSINKSSPLQKQLPAFISEDASGYLTSSWLTLFVPSVYTGVFVVSLPLNIMAIVVFILKMKVKKPAVVYMLHLATADVLFVSVLPFKISYYFSGSDWQFGSELCRFVTAAFYCNMYASILLMTVISIDRFLAVVYPMQSLSWRTLGRASFTCLAIWALAIAGVVPLVLKEQTIQVPGLNITTCHDVLNETLLEGYYAYYFSAFSAVFFFVPLIISTVCYVSIIRCLSSSAVANRSKKSRALFLSAAVFCIFIICFGPTNVLLIAHYSFLSHTSTTEAAYFAYLLCVCVSSISSCIDPLIYYYASSECQRYVYSILCCKESSDPSSYNSSGQLMASKMDTCSSNLNNSIYKKLLT

SEQ ID NO: 325 - DNA, 1348 bp, Homo sapiens
tagcttcaagccactgaagatggaaaacgagacagtcagtgaactgaaccaaacacagcttcagccacgagcagtggtggccttagaataccaggtggtcaccatcttacttgtactcattatttgtggcctgggcattgtaggcaacatcatggtagtcctggttgtcatgagaaccaagcacatgaggacccccacaaactgctacctggtgagcctggcagtagctgatctcatggtcttggtggccgcaggcctccccaacataacagacagtatctacggttcctgggtctatggctatgttggatgcctctgcattacttacctccagtatttgggaattaatgcatcctcttgttcaataacagcctttaccattgagaggtacatagcaatctgtcaccccatcaaagcccagtttctctgcacattttccagagccaaaaagattatcatctttgtctgggctttcacatctctttactgtatgctctggttcttcttgctggatctcaatattagcacctacaaagatgctattgtgatatcctgtggctacaagatctccaggaattactactcacctatttacctaatggactttggtgtcttttatgttgtgccaatgatcctggctaccgtcctctatggattcatagctagaatccttttcttaaatcccattccttcagatcctaaagaaaactctaagacatggaaaaatgattcaacccatcagaacacaaatctgaatgtaaatacctctaatagatgtttcaacagcacagtatcttcaaggaagcaggtcaccaagatgctggcagtggttgtaattctgtttgcccttttatggatgccctacaggactctagtggttgtcaactcatttctctccagtcctttccaagaaaattggtttttgctcttttgcagaatttgcatttatctcaacagtgccatcaacccggtgatttacaatctcatgtcccagaaattccgtgcagccttcagaaagctctgcaactgcaagcagaagccaacagagaaacctgctaactacagtgtggccctaaattacagcgtcatcaaggagtcagaccatttcagcacagagcttgatgatatcactgtcactgacacttacctgtctgccacaaaagtgtcttttgatgacacctgcttggcttctgaggtatcctttagccaaagttgattcatgaattagaagaaaatggatgacaaagaaattgagaatctgtgcagtcatcaacaaaagggagaacatggccaatagtcatatgtgaagacagagcagatcagtctttgtcaatgctctaacaaaccg

SEQ ID NO: 326 - protein, 398 aa, Homo sapiens
MENETVSELNQTQLQPRAVVALEYQVVTILLVLIICGLGIVGNIMVVLVVMRTKHMRTPTNCYLVSLAVADLMVLVAAGLPNITDSIYGSWVYGYVGCLCITYLQYLGINASSCSITAFTIERYIAICHPIKAQFLCTFSRAKKIIIFVWAFTSLYCMLWFFLLDLNISTYKDAIVISCGYKISRNYYSPIYLMDFGVFYVVPMILATVLYGFIARILFLNPIPSDPKENSKTWKNDSTHQNTNLNVNTSNRCFNSTVSSRKQVTKMLAVVVILFALLWMPYRTLVVVNSFLSSPFQENWFLLFCRICIYLNSAINPVIYNLMSQKFRAAFRKLCNCKQKPTEKPANYSVALNYSVIKESDHFSTELDDITVTDTYLSATKVSFDDTCLASEVSFSQS

SEQ ID NO: 327 - DNA, 2347 bp, Homo sapiens
attcggagctgcctcctcgccaatgattccagcgcctgacagccaggaccccaggcagcagcgagtgacaggacgtctggaccggcgcgccgctagcagctctgccgggccgcggcggtgatcgatggggagcggctggagcggacccagcgagtgagggcgcacagccgggacgccgaggcggcgggcgggagacccgcaccagcgcagccggccctcggcgggacgtgacgcagcgcccggggcgcgggtttgatatttgacaaattgatctaaaatggctgggtttttatctgaataactcactgatgccatcccagaaagtcggcaccaggtgtatttgatatagtgtttgcaacaaattcgacccaggtgatcaaaatgattctcaactcttctactgaagatggtattaaaagaatccaagatgattgtcccaaagctggaaggcataattacatatttgtcatgattcctactttatacagtatcatctttgtggtgggaatatttggaaacagcttggtggtgatagtcatttacttttatatgaagctgaagactgtggccagtgtttttcttttgaatttagcactggctgacttatgctttttactgactttgccactatgggctgtctacacagctatggaataccgctggccctttggcaattacctatgtaagattgcttcagccagcgtcagtttcaacctgtacgctagtgtgtttctactcacgtgtctcagcattgatcgatacctggctattgttcacccaatgaagtcccgccttcgacgcacaatgcttgtagccaaagtcacctgcatcatcatttggctgctggcaggcttggccagtttgccagctataatccatcgaaatgtatttttcattgagaacaccaatattacagtttgtgctttccattatgagtcccaaaattcaacccttccgatagggctgggcctgaccaaaaatatactgggtttcctgtttccttttctgatcattcttacaagttatactcttatttggaaggccctaaagaaggcttatgaaattcagaagaacaaaccaagaaatgatgatatttttaagataattatggcaattgtgcttttctttttcttttcctggattccccaccaaatattcacttttctggatgtattgattcaactaggcatcatacgtgactgtagaattgcagatattgtggacacggccatgcctatcaccatttgtatagcttattttaacaattgcctgaatcctcttttttatggctttctggggaaaaaatttaaaagatattttctccagcttctaaaatatattcccccaaaagccaaatcccactcaaacctttcaacaaaaatgagcacgctttcctaccgcccctcagataatgtaagctcatccaccaagaagcctgcaccatgttttgaggttgagtgacatgttcgaaacctgtccataaagtaattttgtgaaagaaggagcaagagaacattcctctgcagcacttcactaccaaatgagcattagctacttttcagaattgaaggagaaaatgcattatgtggactgaaccgacttttctaaagctctgaacaaaagcttttctttccttttgcaacaagacaaagcaaagccacattttgcattagacagatgacggctgctcgaagaacaatgtcagaaactcgatgaatgtgttgatttgagaaattttactgacagaaatgcaatctccctagcctgcttttgtcctgttattttttatttccacataaaggtatttagaatatattaaatcgttagaggagcaacaggagatgagagttccagattgttctgtccagtttccaaagggcagtaaagttttcgtgccggttttcagctattagcaactgtgctacacttgcacctggtactgcacattttgtacaaagatatgctaagcagtagtcgtcaagttgcagatctttttgtgaaattcaacctgtgtcttataggtttacactgccaaaacaatgcccgtaagatggcttatttgtataatggtgttactaaagtcacatataaaagttaaactacttgtaaaggtgctgcactggtcccaagtagtagtgtcctcctagtatattagtttgatttaatatctgagaagtgtatatagtttgtggtaaaaagattatatatcataaagtatgccttcctgtttaaaaaaagtatatattctacacatatatatatatgtatatctatatctctaaactgctgttaattgattaaaatctggcaaagttatatttactttaaaataaaataattttattgc

SEQ ID NO: 328 - protein, 359 aa, Homo sapiens [sequence omitted]

SEQ ID NO: 329 - DNA, 2443 bp, Homo sapiens
acgtcccagcgtctgagagaacgagtaagcaagaattcaaagcattctgcagcctgaattttgaaggagtgtgtttaggcactaagcaagctgatttatgataactgctttaaacttcaacaaccaaaggcataagaactaggagctgctgacatttcaatatgaagggcaactccacccttgccactactagcaaaaacattaccagcggtcttcacttcgggcttgtgaacatctctggcaacaatgagtctaccttgaactgttcacagaaaccatcagataagcatttagatgcaattcctattctttactacattatatttgtaattggatttctggtcaatattgtcgtggttacactgttttgttgtcaaaagggtcctaaaaaggtttctagcatatacatcttcaacctcgctgtggctgatttactccttttggctactcttcctctatgggcaacctattattcttatagatatgactggctctttggacctgtgatgtgcaaagtttttggttcttttcttaccctgaacatgtttgcaagcattttttttatcacctgcatgagtgttgataggtaccaatctgtcatctacccctttctgtctcaaagaagaaatccctggcaagcatcttatatagttccccttgtttggtgtatggcctgtttgtcctcattgccaacattttattttcgagacgtcagaaccattgaatacttaggagtgaatgcttgcattatggctttcccacctgagaaatatgcccaatggtcagctgggattgccttaatgaaaaatatccttggttttattatccctttaatattcatagcaacatgctattttggaattagaaaacacttactgaagacgaatagctatgggaagaacaggataacccgtgaccaagtcctgaagatggcagctgctgttgttctggccttcatcatttggtgccttcccttccatgttctgaccttcctggatgctctggcctggatgggtgtcattaatagctgcgaagttatagcagtcattgacctggcacttccttttgccatcctcttgggattcaccaacagctgcgttaatccgtttctgtattgttttgttggaaaccggttccaacagaagctccgcagtgtgtttagggttccaattacttggctccaagggaaaagagagagtatgtcttgccggaaaagcagttctcttagagaaatggagacctttgtgtcttaaacggagagcaaaatgcatgtaatcaacatggctacttgctttgaggctcaccagaattatttttaagtggttttaataaaataataaaatttcccctaatcttttctgaatcttctgaaaccaaatgtaactatgtttatcgtccagtgactttcaggaatgcccattgttttctgatatgtttgtacaagatttcattggtgagacatatttacaacctagaagtaactggtgatatatctcaaattgtaattaataatagattgtgaataatgatttggggattcagatttctctttgaaacatgcttgtgtttcttagtggggttttatatccatttttatcaggatttcctcttgaaccagaaccagtctttcaactcattgcatcatttacaagacaacattgtaagagagatgagcacttctaagttgagtatattataatagattagtactggattattcaggctttaggcatatgcttctttaaaaacgctataaattatattcctcttgcatttcacttgagtggaggtttatagttaatctataactacatattgaatagggctaggaatatagattaaatcatactcctatgctttagcttatttttacagttatagaaagcaagatgtactataacatagaattgcaatctataatatttgtgtgttcactaaactctgaataagcactttttaaaaaactttctactcattttaatgattgtttaaaggtttctattttctctgatacttttttgaaatcagtaaacactgtgtattgttgtaaaatgtaaaggtcacttttcacatccttgactttttagatgtgctgctttgatatataggacattgatttgatttttattattaatgctttggttctgggttgtttcctaaaatatctgggtggcttaaaaaaaactctttaacttgtaataaacccttaactggcataggaaatggtatccagaatggaattttgctacatggggtctgggtgggggcaaagagacccagtcaattacatgtttggtaccaagaaaggaacctgtcagggcagtacaatgtgactttgaaaatatataccgtgggggtagttttaccctatatctataaacactgtttgttccagaatctgtatgattctatggagctattttaaaccaattgcaggtctaga

SEQ ID NO: 330 - protein, 363 aa, Homo sapiens [sequence omitted]

SEQ ID NO: 331 - DNA, 1098 bp, Homo sapiens
atggccagtacagagtcctccctgttgagatccctaggcctcagcccaggtcctggcagcagtgaggtggagctggactgttggtttgatgaggatttcaagttcatcctgctgcctgtgagctatgcagttgtctttgtgctgggcttgggccttaacgccccaaccctatggctcttcatcttccgcctccgaccctgggatgcaacggccacctacatgttccacctggcattgtcagacaccttgtatgtgctgtcgctgcccaccctcatctactattatgcagcccacaaccactggccctttggcactgagatctgcaagttcgtccgctttcttttctattggaacctctactgcagtgtccttttcctcacctgcatcagcgtgcaccgctacctgggcatctgccacccacttcgggcactacgctggggccgccctcgcctcgcaggccttctctgcctggcagtttggttggtcgtagccggctgcctcgtgcccaacctgttctttgtcacaaccagcaacaaagggaccaccgtcctgtgccatgacaccactcggcctgaagagtttgaccactatgtgcacttcagctcggcggtcatggggctgctctttggcgtgccctgcctggtcactcttgtttgctatggactcatggctcgtcgcctgtatcagcccttgccaggctctgcacagtcgtcttctcgcctccgctctctccgcaccatagctgtggtgctgactgtctttgctgtctgcttcgtgcctttccacatcacccgcaccatttactacctggccaggctgttggaagctgactgccgagtactgaacattgtcaacgtggtctataaagtgactcggcccctggccagtgccaacagctgcctggatcctgtgctctacttgctcactggggacaaatatcgacgtcagctccgtcagctctgtggtggtggcaagccccagccccgcacggctgcctcttccctggcactagtgtccctgcctgaggatagcagctgcaggtgggcggccaccccccaggacagtagctgctctactcctagggcagatagattgtaa

SEQ ID NO: 332 - protein, 365 aa, Homo sapiens
MASTESSLLRSLGLSPGPGSSEVELDCWFDEDFKFILLPVSYAVVFVLGLGLNAPTLWLFIFRLRPWDATATYMFHLALSDTLYVLSLPTLIYYYAAHNHWPFGTEICKFVRFLFYWNLYCSVLFLTCISVHRYLGICHPLRALRWGRPRLAGLLCLAVWLVVAGCLVPNLFFVTTSNKGTTVLCHDTTRPEEFDHYVHFSSAVMGLLFGVPCLVTLVCYGLMARRLYQPLPGSAQSSSRLRSLRTIAVVLTVFAVCFVPFHITRTIYYLARLLEADCRVLNIVNVVYKVTRPLASANSCLDPVLYLLTGDKYRRQLRQLCGGGKPQPRTAASSLALVSLPEDSSCRWAATPQDSSCSTPRADRL

SEQ ID NO: 333 - DNA, 4153 bp, Homo sapiens
taattgcttgaaggattttttccagacaggtggtctggaaaccttttacctattaccttccatccctgaaccatttcaatcttctgcctcctggatatcttggagaaaatgaaccaacacaacacagctttcagtttttagagcatttcccccatacagaacattgtcttacttgatcttcccgatgacctcaacaacaggaaaggcaggtcctttcatttccatttataagacgcacagacccaggattatctagccacaggaagcaggactccagatttcaagtccagcatctcaacgtgacaaccttggtaactctgcatgaacggactggatagtaaagtggaattattactgagaactgcaatgaataaaatcttttgcattttttgcctacgtttcacagagggtgatatttttctgaggcaattaaatttataccacggccacaatactgaaacgttctgaccaacaaagtcatgctcctgcatctacacagcagataactgcagaaacggcttcctttcttccttgtaaaattgcctgaaaacagctcccccttgctgtccgtcgaggcatatcttcaccaacgttaaaacagagctgagggagatcgcatttctgcctccctcccgccctgcagaggggctccagctgttcagagtaacggattactaggtaggtggttgtttcccctccttcccagggcctctttcctctctttgagattgcctctttcttactcctgagcacaggagccgggcgggttttctgtcccttgccctggacagcactgcctggatggccgctgtccggcagctgctctttgtccacccaaaaagatgtccccacgactcagtagtaaccagacggtccccacggaccactgcggccaaatttccgccatccccgctgtgggaatcaggcttttcccgcagaaaaccccaggaatctagagaaaactccttaagtccctagtctccatagagaaaaccaggagacactccccccaaaccccgctgtgaatacaggcacagcagccactggggcctgaaagtgatgagtgcgttcttcccgtcgcaaacatagggtaataaatagcatgcatcaaagacgttactaggaagagatagctctttaagtcacgaggggggagaaatgtttgccccgggaaaatttgcctggggaataaaatttgccagactgctgcacgggtgagctcggtgagaaggaagaaacccggactggaggaggtgaggtcgagagccaggttcaggtgcaggagctagatgcgtggacgccggtgcgtggactggaggtttccaggtaccgcgcttagcgtgcctgttgaagtcaaatgcatggttaaggaggctagcgaggaaggctagtgagggaagcttgtggaaacggctacgagcccagaaaaggcatgactcgtcagttgtccaagtttttggaagggaaaagcgggaaagcgccacgatcccacctactgtgaggaggaatctgcgagtctcccagctccaccccctccacagtgatgcagaggacaaacaccgacgtagggagaggaaaaaataaaactccagggagcggggagtaggcaaccagcagtcttccggcaatagggcgggagggagcgcgtcccaaggaaacaagcaccgcataaatacttgagttgggaacccagtgcttccggaagctcggagctcaccttcccgacctcgccgaagttgaaaaaaggcagagcagggagaggggccagctcaccctgctgagagctgctcagtgggcaggcgggacgctgctccgggagacgcccactggagggatcgcagagcccggcaagctgcgagcgcgccaaagaccctgcgcttcggacgaggagcccaagtcctccgagacggggagggagcgcgccgcgagggctggagctccgaagagggccgagtaggagctgcatggacagcatgcgtctctccgccggtcccgacgcggggccctcgggcaactccagcccatggtggcctctggccaccggcgctggcaacacaagccgggaggccgaagccctcggggagggcaacggcccaccgagggacgtgcgcaacgaggagctggccaaactggagatcgccgtgctggcggtgactttcgcggtggccgtgctgggcaacagcagcgtactgctggctctgcaccggacgccgcgcaagacgtcccgcatgcacctcttcatccgacacctcagcctggccgacctggccgtggcattcttccaggtgctgccgcaaatgtgctgggacatcacctaccgcttccgcggccccgactggctgtgccgcgtggtgaagcacctgcaggtgttcggcatgtttgcgtcggcctacatgctggtagtcatgacagccgaccgctacatcgcggtgtgccacccgctcaagactctgcaacagcccgcgcgccgctcgcgcctcatgatcgcggccgcctgggtgctgagcttcgtgctgagcacgccgcagtacttcgtcttctccatgatcgaggtgaacaatgtcaccaaggcccgcgactgctgggccaccttcatccagccctggggttctcgtgcctacgtgacctggatgacgggcggcatctttgtggcgcccgtggtcatcttgggtacctgctacggcttcatctgctacaacatctggtgcaacgtccgcgggaagacggcgtcgcgccagagcaagggtgcagagcaagcgggtgtggccttccaaaaggggttcctgctcgcaccctgtgtcagcagcgtgaagtccatttcccgggccaagatccgcacggtgaagatgacttttgtgatcgtgacggcttacatcgtctgctgggcgcctttcttcatcatccagatgtggtctgtctgggatcccatgtccgtctggaccgaatcggaaaaccctaccatcaccatcactgcattactgggttccttgaatagctgctgtaatccctggatatacatgttttttagtggccatctccttcaagactgtgttcaaagcttcccatgctgccaaaacatgaaggaaaaattcaacaaagaagatactgacagtatgagcagaagacagactttttattctaacaatcgaagcccaacaaacagtacgggtatgtggaaggactcgcctaaatcttccaagtccatcaaattcattcctgtttcaacttgagccttgcattcatgcaacttgattcttgtgattgactttttggctcattagctgaattgagctagaaatcacaagaacaaatacactttattaatataaccataaatcaattcattgtgtatgagactgtgtttctagttgcattttcatattgctaccaaaaactagacattattttgtatggaatattaatggaaacatgctgtactaaaatatgcaggtctgattcccagaaatacaacagaagttatatttttaaaggaaaaatcataaccaccctagctttatattttgttgttagtttcttttattttcatttctaacataagtaagacttgattggtttaaaagtcacataaaatgcggcactatttctgaacaaagagagctcatcatcagtcttaatattcagagaaaacttcagagaaattatgttttcatccattaaaattaatttgtgcatcagaaaatgcagccttaaacagtgtccaggagatgggatggtacctcctaggagtacaagtgcctggggtgtaatgagctcctgctcattgtggccagtttagagttctattagaagctatcaatcaccttgcatttcaaaatggtaactttacaactggcagtggcctccttttggttcctcacatattattggtcaagaaaagcatgaaaactgagatgctgaaggtgagaggaaatgttgactggccaaaaatatcttttttcccccactgcaaggttgttttaaagtcagatttgtataaggaaagccaaattttattaaaagagtagaaaaggattgcttaaggtactctggactttctcttggacattgtaaacgtattttgatcagtattacaagggtatcctgtgctatgctggacattaacaagatcattatcttcatgtttggggaattc

SEQ ID NO: 334 - protein, 418 aa, Homo sapiens
MRLSAGPDAGPSGNSSPWWPLATGAGNTSREAEALGEGNGPPRDVRNEELAKLEIAVLAVTFAVAVLGNSSVLLALHRTPRKTSRMHLFIRHLSLADLAVAFFQVLPQMCWDITYRFRGPDWLCRVVKHLQVFGMFASAYMLVVMTADRYIAVCHPLKTLQQPARRSRLMIAAAWVLSFVLSTPQYFVFSMIEVNNVTKARDCWATFIQPWGSRAYVTWMTGGIFVAPVVILGTCYGFICYNIWCNVRGKTASRQSKGAEQAGVAFQKGFLLAPCVSSVKSISRAKIRTVKMTFVIVTAYIVCWAPFFIIQMWSVWDPMSVWTESENPTITITALLGSLNSCCNPWIYMFFSGHLLQDCVQSFPCCQNMKEKFNKEDTDSMSRRQTFYSNNRSPTNSTGMWKDSPKSSKSIKFIPVST

SEQ ID NO: 335 - DNA, 2273 bp, Homo sapiens
ctccagccgctgctcaccaggcagagcgagcgggcttggctggggcttcctgccctgagcgcgacaccgactgctccggaccgcgcctccaagcaggctgaagggcttccgctcttggcttccagaaaagtttggagaaagagaatttgaggcggattggagggtggtagcccctccccagccttctttctctcccagaagcctcactctgcacagcgtcccccattcttcccgtcctgattccccatcttcctgacccctccttctccctctcctgggtcgatcccagtcacattttctccttccgaatctcatcctccctcctcctctctatcccagtcctctgaacgatttccgcctatttggaagccttctccctgtcattctcaacgcttctcctttctctccacctcccctgccactccattttatccatcaaacctctccacttggatccacaccctcccttcatccttccctcccagcaaaccttgctcatggattctgggcctctgtgggatgccaaccccacccctcggggcaccctctctgcccccaatgccacaacaccctggctgggccgggatgaggagctggccaaggtggagatcggagtcctggccactgtcctggtgctggcgaccgggggcaacctggctgtgctgctgaccctgggccagctgggccgcaagcgctcccgcatgcacctgttcgtgctgcacttagccctgacagacctggccgtggcgctcttccaggtgctgccacagctgctgtgggacatcacctaccgcttccagggccccgacctcctgtgcagggccgtcaagtacctgcaggtgctcagcatgtttgcctccacctacatgctgctggccatgacgctggaccgctacctggctgtctgtcaccccctgcgcagcctccagcagccaggccagtccacctacctgctcatcgctgctccctggctgctggccgccatcttcagcctccctcaagtcttcattttttccctgcgggaggtgatccagggctcaggggtgctggactgctgggcagacttcggcttcccttgggggccacgggcctacctcacctggaccaccctggctatcttcgttctgccggtgaccatgctcacggcctgctacagcctcatctgccatgagatctgtaaaaacctaaaagtcaagacacaggcctggcgggtgggaggagggggctggaggacttgggacaggccctcaccttccaccttagctgccaccactcgggggctgccatctcgggtcagcagcatcaacaccatctcacgggccaagatccgaacagtgaagatgacctttgtcatcgtgctggcctacatcgcttgctgggctcccttcttcagtgtccagatgtggtccgtgtgggacaagaatgcccctgatgaagattccaccaatgtggctttcaccatctctatgcttttgggcaacctcaacagctgctgcaacccctggatctacatgggcttcaacagccacctgttaccgcggcccctgcgtcaccttgcctgctgtgggggtccccagcccaggatgcgccggcggctctccgacggcagcctctcgagccgccacaccacgctgctgacccgctccagctgcccggccaccctcagcctcagcctcagcctaaccctcagtgggaggcccaggcctgaagagtcaccaagggacttggagctggcagatggggaaggcaccgctgagaccatcatcttttaggaaagactcgctggggtctggtactgcccccaggactagtggaggttctctgcccacctcaggcactggaaatgagagctgggagggtaagggttggagttagaggaggccctgtctgaagcagagccaaaaggccagaatgggtcccctaccctggtgtcacagctgcccctagtgtgagggctgcctcataagctcccaatctcagacactggcagtcagggagaatcaaactgcctgtctccctggtcctgccatattcatagggtgtccatgcacacatggtgtcccagatctaggcaggcctaggatggtgctgtctaggggtccacgggtggcaggaattcagaggctggccttgtgccctggctacctgtctccattctaacctgactggcacatctcagcctaaccaggagaggggagaagtgaaaaaccgtgaggaggactctatttggatcctggatttgttgttgttgttgttgttgttgttagagagaa

SEQ ID NO: 336 - protein, 424 aa, Homo sapiens
MDSGPLWDANPTPRGTLSAPNATTPWLGRDEELAKVEIGVLATVLVLATGGNLAVLLTLGQLGRKRSRMHLFVLHLALTDLAVALFQVLPQLLWDITYRFQGPDLLCRAVKYLQVLSMFASTYMLLAMTLDRYLAVCHPLRSLQQPGQSTYLLIAAPWLLAAIFSLPQVFIFSLREVIQGSGVLDCWADFGFPWGPRAYLTWTTLAIFVLPVTMLTACYSLICHEICKNLKVKTQAWRVGGGGWRTWDRPSPSTLAATTRGLPSRVSSINTISRAKIRTVKMTFVIVLAYIACWAPFFSVQMWSVWDKNAPDEDSTNVAFTISMLLGNLNSCCNPWIYMGFNSHLLPRPLRHLACCGGPQPRMRRRLSDGSLSSRHTTLLTRSSCPATLSLSLSLTLSGRPRPEESPRDLELADGEGTAETIIF

SEQ ID NO: 337 - DNA, 1809 bp, Homo sapiens
agaagatcctgggttctgtgcatccgtctgtctgaccatccctctcaatcttccctgcccaggactggccatactgccaccgcacacgtgcacacacgccaacaggcatctgccatgctggcatctctataagggctccagtccagagaccctgggccattgaacttgctcctcaggcagaggctgagtccgcacatcacctccaggccctcagaacacctgccccagccccaccatgctcatggcgtccaccacttccgctgtgcctgggcatccctctctgcccagcctgcccagcaacagcagccaggagaggccactggacacccgggacccgctgctagcccgggcggagctggcgctgctctccatagtctttgtggctgtggccctgagcaatggcctggtgctggcggccctagctcggcggggccggcggggccactgggcacccatacacgtcttcattggccacttgtgcctggccgacctggccgtggctctgttccaagtgctgccccagctggcctggaaggccaccgaccgcttccgtgggccagatgccctgtgtcgggccgtgaagtatctgcagatggtgggcatgtatgcctcctcctacatgatcctggccatgacgctggaccgccaccgtgccatctgccgtcccatgctggcgtaccgccatggaagtggggctcactggaaccggccggtgctagtggcttgggccttctcgctccttctcagcctgccccagctcttcatcttcgcccagcgcaacgtggaaggtggcagcggggtcactgactgctgggcctgctttgcggagccctggggccgtcgcacctatgtcacctggattgccctgatggtgttcgtggcacctaccctgggtatcgccgcctgccaggtgctcatcttccgggagattcatgccagtctggtgccagggccatcagagaggcctggggggcgccgcaggggacgccggacaggcagccccggtgagggagcccacgtgtcagcagctgtggccaagactgtgaggatgacgctagtgattgtggtcgtctatgtgctgtgctgggcacccttcttcctggtgcagctgtgggccgcgtgggacccggaggcacctctggaaggggcgccctttgtgctactcatgttgctggccagcctcaacagctgcaccaacccctggatctatgcatctttcagcagcagcgtgtcctcagagctgcgaagcttgctctgctgtgcccggggacgcaccccacccagcctgggtccccaagatgagtcctgcaccaccgccagctcctccctggccaaggacacttcatcgtgaggagctgttgggtgtcttgcctctagaggctttgagaagctcagctgccttcctggggctggtcctgggagccactgggagggggacccgtggagaattggccagagcctgtggccccgaggctgggacactgtgtggccctggacaagccacagcccctgcctgggtctccacatccccagctgtatgaggagagcttcaggccccaggactgtgggggcccctcaggtcagctcactgagctgggtgtaggaggggctgcagcagaggcctgaggagtggcaggaaagagggagcaggtgcccccaggtgagacagcggtcccaggggcctgaaaaggaaggaccaggctggggccaggggaccttcctgtctccgcctttctaatccctccctcctcattctctccctaataaaaattggagctcttttccacatggcaaggggtctccttggaa

SEQ ID NO: 338 - protein, 371 aa, Homo sapiens
MLMASTTSAVPGHPSLPSLPSNSSQERPLDTRDPLLARAELALLSIVFVAVALSNGLVLAALARRGRRGHWAPIHVFIGHLCLADLAVALFQVLPQLAWKATDRFRGPDALCRAVKYLQMVGMYASSYMILAMTLDRHRAICRPMLAYRHGSGAHWNRPVLVAWAFSLLLSLPQLFIFAQRNVEGGSGVTDCWACFAEPWGRRTYVTWIALMVFVAPTLGIAACQVLIFREIHASLVPGPSERPGGRRRGRRTGSPGEGAHVSAAVAKTVRMTLVIVVVYVLCWAPFFLVQLWAAWDPEAPLEGAPFVLLMLLASLNSCTNPWIYASFSSSVSSELRSLLCCARGRTPPSLGPQDESCTTASSSLAKDTSS

SEQ ID NO: 339 - DNA, 1374 bp, Homo sapiens
gaataagccttcgataattatgaagggtgtttcggtatcttccctccaaaatgctaagaaataatttaggcaacagttcagactctaaaaatgaagatggctcggtcttttcacagactgaacacaatattgttgcaacttacttgattatggcaggtatgataagtattatcagcaacataatagttctgggcatcttcattaagtacaaggaacttcggacacccacaaatgcaattattattaacctggctgttactgatataggggtcagtagcattggctatcccatgtctgctgcctcagatctgtatggaagttggaaatttggatacgcaggctgtcaggtttatgctggattgaatattttttttggaatggcaagcattggattactcacggtcgtggctgtggaccgatacctgaccatctgccttcctgacgtagggagaagaatgaccaccaacacttacatcggcttgattctgggagcctggatcaatggcctgttttgggctttgatgcctatcatagggtgggctagttatgccccagatcctactggtgctacgtgtaccataaactggaggaaaaatgatagatcttttgtgtcttacaccatgacagttattgcgataaattttattgtgcccttgacagtgatgttttactgctattaccatgtcacgctatccattaaacatcacactaccagtgactgcactgagtccctcaacagagactggtcagatcagatagatgtaacaaagatgtctgtgatcatgatctgcatgtttctggtggcatggtccccttattccatcgtgtgcttatgggcttcttttggtgacccaaagaagattcctccccccatggccatcatagctccactgtttgcaaaatcttctacattctataacccctgcatttatgtggttgctaataaaaagtttcggagggcaatgcttgccatgttcaaatgtcagactcaccaaacaatgcctgtgacaagtattttacccatggatgtatctcaaaacccattggcttctggaagaatctgaaataagagaaaaggacacgctatcaaaacactttagttttttgacaatgcttttcttttaaatatgagcccatttagatcaagtgcagacatggatcattgtcctatgagagtgtaagctcctcaagcacagctcgtgcttccgtttgtgcactctggctgctgtagtgtatgcttctctgtgtcctgatatatcaacttattgctcatctcctttgatgaattaggcatcagaggttaaggtcccctttctttctccctattatggcatgcattacactgtactgatgacctttaacttgcctggctcc

SEQ ID NO: 340 - protein, 337 aa, Homo sapiens
MLRNNLGNSSDSKNEDGSVFSQTEHNIVATYLIMAGMISIISNIIVLGIFIKYKELRTPTNAIIINLAVTDIGVSSIGYPMSAASDLYGSWKFGYAGCQVYAGLNIFFGMASIGLLTVVAVDRYLTICLPDVGRRMTTNTYIGLILGAWINGLFWALMPIIGWASYAPDPTGATCTINWRKNDRSFVSYTMTVIAINFIVPLTVMFYCYYHVTLSIKHHTTSDCTESLNRDWSDQIDVTKMSVIMICMFLVAWSPYSIVCLWASFGDPKKIPPPMAIIAPLFAKSSTFYNPCIYVVANKKFRRAMLAMFKCQTHQTMPVTSILPMDVSQNPLASGRI

SEQ ID NO: 341 - DNA, 5535 bp, Homo sapiens
ggactttagaagccgttgctgccctctctgtcacctgaagcggggccctctcccatcccacccttgccccgcctccctgcccccaccgggccggccctgcccgccgccggaccctggcatgtcaagacctggtccgcgcctgcctgcccagcccgcggaaccccggcggccccgcgagctaggatgaggggccaggccgccgccccgggccccgtctggatcctcgccccgctgctactgctgctgctgctgctgggacgccgcgcgcgggcggccgccggagcagacgcggggcccgggcccgagccgtgcgccacgctggtgcagggaaagttcttcggctacttctccgcggccgccgtgttcccggccaacgcctcgcgctgctcctggacgctacgcaacccggacccgcggcgctacactctctacatgaaggtggccaaggcgcccgtgccctgcagcggccccggccgcgtgcgcacctaccagttcgactccttcctcgagtccacgcgcacctacctgggcgtggagagcttcgacgaggtgctgcggctctgcgacccctccgcacccctggccttcctgcaggccagcaagcagttcctgcagatgcggcgccagcagccgccccagcacgacgggctccggccccgggccgggccgccgggccccaccgacgacttctccgtggagtacctggtggtggggaaccgcaaccccagccgtgccgcctgccagatgctgtgccgctggctggacgcgtgtctggccggtagtcgcagctcgcacccctgcgggatcatgcagaccccctgcgcctgcctgggcggcgaggcgggcggccctgccgcgggacccctggccccccgcggggatgtctgcttgagagatgcggtggctggtggccctgaaaactgcctcaccagcctgacccaggaccggggcgggcacggcgccacaggcggctggaagctgtggtccctgtggggcgaatgcacgcgggactgcgggggaggcctccagacgcggacgcgcacctgcctgcccgcgccgggcgtggagggcggcggctgcgagggggtgctggaggagggtcgccagtgcaaccgcgaggcctgcggccccgctgggcgcaccagctcccggagccagtccctgcggtccacagatgcccggcggcgcgaggagctgggggacgagctgcagcagtttgggttcccagccccccagaccggtgacccagcagccgaggagtggtccccgtggagcgtgtgctccagcacctgcggcgagggctggcagacccgcacgcgcttctgcgtgtcctcctcctacagcacgcagtgcagcggacccctgcgcgagcagcggctgtgcaacaactctgccgtgtgcccagtgcatggtgcctgggatgagtggtcgccctggagcctctgctccagcacctgtggccgtggctttcgggatcgcacgcgcacctgcaggcccccccagtttgggggcaacccctgtgagggccctgagaagcaaaccaagttctgcaacattgccctgtgccctggccgggcagtggatggaaactggaatgagtggtcgagctggagcgcctgctccgccagctgctcccagggccgacagcagcgcacgcgtgaatgcaacgggccttcctacgggggtgcggagtgccagggccactgggtggagacccgagactgcttcctgcagcagtgcccagtggatggcaagtggcaggcctgggcgtcatggggcagttgcagcgtcacgtgtggggctggcagccagcgacgggagcgtgtctgctctgggcccttcttcgggggagcagcctgccagggcccccaggatgagtaccggcagtgcggcacccagcggtgtcccgagccccatgagatctgtgatgaggacaactttggtgctgtgatctggaaggagaccccagcgggagaggtggctgctgtccggtgtccccgcaacgccacaggactcatcctgcgacggtgtgagctggacgaggaaggcatcgcctactgggagccccccacctacatccgctgtgtttccattgactacagaaacatccagatgatgacccgggagcacctggccaaggctcagcgagggctgcctggggagggggtctcggaggtcatccagacactggtggagatctctcaggacgggaccagctacagtggggacctgctgtccaccatcgatgtcctgaggaacatgacagagattttccggagagcgtactacagccccacccctggggacgtacagaactttgtccagatccttagcaacctgttggcagaggagaatcgggacaagtgggaggaggcccagctggcgggccccaacgccaaggagctgttccggctggtggaggactttgtggacgtcatcggcttccgcatgaaggacctgagggatgcataccaggtgacagacaacctggttctcagcatccataagctcccagccagcggagccactgacatcagcttccccatgaagggctggcgggccacgggtgactgggccaaggtgccagaggacagggtcactgtgtccaagagtgtcttctccacggggctgacagaggccgatgaagcatccgtgtttgtggtgggcaccgtgctctacaggaacctgggcagcttcctggccctgcagaggaacacgaccgtcctgaattctaaggtgatctccgtgactgtgaaacccccgcctcgctccctgcgcacacccttggagatcgagtttgcccacatgtataatggcaccaccaaccagacctgtatcctgtgggatgagacggatgtaccctcctcctccgcccccccgcagctcgggccctggtcgtggcgcggctgccgcacggtgcccctcgacgccctccggacgcgctgcctctgtgaccggctctccaccttcgccatcttagcccagctcagcgccgacgcgaacatggagaaggcgactctgccgtcggtgacgctcatcgtgggctgtggcgtgtcctctctcaccctgctcatgctggtcatcatctacgtgtccgtgtggaggtacattcgctcagagcgttctgtcatcctcatcaacttctgcctgtccatcatctcctccaatgccctcatcctcatcgggcagacccagacccgcaacaaggtgatgtgcacgctggtggccgccttcctgcacttcttcttcctgtcctccttctgctgggtgctcaccgaggcctggcagtcctacatggccgtgacgggccacctccggaaccgcctcatccgcaagcgcttcctctgcctgggctgggggctccctgcactggttgtggccatttctgtgggattcaccaaggccaaagggtacagcaccatgaactactgctggctctccctggaggggggactgctctatgccttcgtgggacctgccgctgccgttgtgctggtgaacatggtcattgggatcctggtgttcaacaagctcgtgtccaaagacggcatcacggacaagaagctgaaggagcgggcaggggcctccctgtggagctcctgcgtggtgctgccgctgctggcgctgacctggatgtcggctgtgctcgccgtcaccgaccgccgctccgccctcttccagatcctcttcgctgtcttcgactcgctggagggcttcgtcatcgtcatggtgcactgtatcctccgtagagaggtccaggacgctgtgaaatgccgtgtggttgaccggcaggaggagggcaacggggactcagggggctccttccagaacggccacgcccagctcatgaccgacttcgagaaggacgtggatctggcctgtagatcagtgctgaacaaggacatcgcggcctgccgcactgccaccatcacgggcacactgaagcggccgtctctgcccgaggaggagaagctgaagctggcccatgccaaggggccgcccaccaatttcaacagcctgccggccaacgtgtccaagctgcacctgcacggctcaccccgctatcccggcgggcccctgcccgacttccccaaccactcactgaccctcaagagggacaaggcgcccaagtcctccttcgtcggtgacggggacatcttcaagaagctggactcggagctgagccgggcccaggagaaggctctggacacgagctacgtgatcctgcccacggccacggccacgctgcggcccaagcccaaggaggagcccaagtacagcatccacattgaccagatgccgcagacccgcctcatccacctcagcacggcccccgaggccagcctccccgcccgcagcccgccctcccgccagccccccagcggcgggccccccgaggcaccccctgcccagcccccaccgcctccgcccccaccgccaccacctccccagcagcccctgcccccaccgcccaatctggagccggcaccccccagcctgggggatcccggggagcctgccgcccatccgggacccagcacggggcccagcaccaagaacgagaatgtcgccaccttgtctgtgagctccctggagcggcggaagtcgcggtatgcagaactggactttgagaagatcatgcacacccggaagcggcaccaagacatgttccaggacctgaaccggaagctgcagcacgcagcggagaaggacaaggaggtgctggggccggacagcaagccggaaaagcagcagacgcccaacaagaggccctgggagagcctccggaaagcccacgggacgcccacgtgggtgaagaaggagctggagccgctgcagccgtcgccgctggagcttcgcagcgtggagtgggagaggtcgggcgccacgatcccgctggtgggccaggacatcatcgacctccagaccgaggtctgagcgggtgggcggcggccacgcactgggccacggaggagggatgctgctccgcccgctcctgccgcagacgggcacagacacgctcgcgggcagcgggccaggcccgcaccccggcctcagggcgctcagacggcggccaggcacagggcccgcagtgctgggaccagagccagatgcaggacaggaggcggcccggccagcgggcacagggcaccagaggccgaaggtgcctcagactccgccctcctcgggccgaggcccagcgggcagatgggcggacggctgtggaccgtggacaggcccagcgcggccagcgtcccagggtacccgcctgagctcctgctgcggaggagctgcctgcttggcccggccggcctggcaccgttttttaaacacccccatccctcgggaagcagccagctccccacaccttccagggccctaggcccctcctagacccaggtggagggcacagccctccgaccctcatggcccccaggggcaggactgagtcccctccaggaagaagcaggggggaatctattttttctctccttttcttttcttcaataaaaagaattaaaaacccaaaaaaaa

SEQ ID NO: 342 - protein, 1584 aa, Homo sapiens
MRGQAAAPGPVWILAPLLLLLLLLGRRARAAAGADAGPGPEPCATLVQGKFFGYFSAAAVFPANASRCSWTLRNPDPRRYTLYMKVAKAPVPCSGPGRVRTYQFDSFLESTRTYLGVESFDEVLRLCDPSAPLAFLQASKQFLQMRRQQPPQHDGLRPRAGPPGPTDDFSVEYLVVGNRNPSRAACQMLCRWLDACLAGSRSSHPCGIMQTPCACLGGEAGGPAAGPLAPRGDVCLRDAVAGGPENCLTSLTQDRGGHGATGGWKLWSLWGECTRDCGGGLQTRTRTCLPAPGVEGGGCEGVLEEGRQCNREACGPAGRTSSRSQSLRSTDARRREELGDELQQFGFPAPQTGDPAAEEWSPWSVCSSTCGEGWQTRTRFCVSSSYSTQCSGPLREQRLCNNSAVCPVHGAWDEWSPWSLCSSTCGRGFRDRTRTCRPPQFGGNPCEGPEKQTKFCNIALCPGRAVDGNWNEWSSWSACSASCSQGRQQRTRECNGPSYGGAECQGHWVETRDCFLQQCPVDGKWQAWASWGSCSVTCGAGSQRRERVCSGPFFGGAACQGPQDEYRQCGTQRCPEPHEICDEDNFGAVIWKETPAGEVAAVRCPRNATGLILRRCELDEEGIAYWEPPTYIRCVSIDYRNIQMMTREHLAKAQRGLPGEGVSEVIQTLVEISQDGTSYSGDLLSTIDVLRNMTEIFRRAYYSPTPGDVQNFVQILSNLLAEENRDKWEEAQLAGPNAKELFRLVEDFVDVIGFRMKDLRDAYQVTDNLVLSIHKLPASGATDISFPMKGWRATGDWAKVPEDRVTVSKSVFSTGLTEADEASVFVVGTVLYRNLGSFLALQRNTTVLNSKVISVTVKPPPRSLRTPLEIEFAHMYNGTTNQTCILWDETDVPSSSAPPQLGPWSWRGCRTVPLDALRTRCLCDRLSTFAILAQLSADANMEKATLPSVTLIVGCGVSSLTLLMLVIIYVSVWRYIRSERSVILINFCLSIISSNALILIGQTQTRNKVMCTLVAAFLHFFFLSSFCWVLTEAWQSYMAVTGHLRNRLIRKRFLCLGWGLPALVVAISVGFTKAKGYSTMNYCWLSLEGGLLYAFVGPAAAVVLVNMVIGILVFNKLVSKDGITDKKLKERAGASLWSSCVVLPLLALTWMSAVLAVTDRRSALFQILFAVFDSLEGFVIVMVHCILRREVQDAVKCRVVDRQEEGNGDSGGSFQNGHAQLMTDFEKDVDLACRSVLNKDIAACRTATITGTLKRPSLPEEEKLKLAHAKGPPTNFNSLPANVSKLHLHGSPRYPGGPLPDFPNHSLTLKRDKAPKSSFVGDGDIFKKLDSELSRAQEKALDTSYVILPTATATLRPKPKEEPKYSIHIDQMPQTRLIHLSTAPEASLPARSPPSRQPPSGGPPEAPPAQPPPPPPPPPPPPQQPLPPPPNLEPAPPSLGDPGEPAAHPGPSTGPSTKNENVATLSVSSLERRKSRYAELDFEKIMHTRKRHQDMFQDLNRKLQHAAEKDKEVLGPDSKPEKQQTPNKRPWESLRKAHGTPTWVKKELEPLQPSPLELRSVEWERSGATIPLVGQDIIDLQTEV

SEQ ID NO: 343 - DNA, 5399 bp, Homo sapiens
gccgcgcgggagagcgggagcctcggccctccgcgcggctgcagctacctaccctgcgcccggccaggtccccgacttagggatggcaaacttgcgccccgtggccgcccccgccagcgccggcccccgctcctgctgctgacggcgcccaggaaatccacagcagtgatacatgtgacgtccacactgacagtgccctcctgtgggcatggctcaggttgtgcgcagttcctggcacactggctgtaactccgcccctttctctccctctcagtaaagcaagattacgcggtgacatgcctcacagctgatcacgacacacggggatggagagcaagagttatggagaatacaggttggatgggcaagggacataggatgaccccagcctgtcccctcttactgtctgtgattctgtccctgcgcctggccaccgccttcgaccccgcccccagtgcctgctctgccctggcctcgggtgtgctctacggggccttctcgctgcaggacctctttcctaccatcgcctcgggctgctcctggaccctggagaaccctgaccccaccaagtactccctctacctgcgcttcaaccgccaggagcaggtgtgcgcacactttgccccccgcctgctgcccctggaccactacctggtcaactttacctgcctgcggcctagccccgaggaggcggtggcccaggcggagtcagaggtggggcggccagaagaggaggaggcagaggcggcagcggggttggagctgtgcagcggctcaggcccctttaccttcctgcacttcgacaagaacttcgtgcagctgtgcctgtcggctgagccctccgaggccccgcgcctgctggcgcccgctgccctagccttccgctttgtcgaggtcttgctcatcaacaacaacaactctagccaattcacctgtggtgtgctctgccgctggagtgaggagtgtggccgcgctgccggcagggcctgcggctttgctcagccaggctgcagctgccctggagaggcgggggccggctccaccaccaccacatctccaggccctcctgctgcccacaccctgtccaatgccctggtgcccgggggcccagccccacctgctgaggccgatttgcactcggggagcagcaatgatctgttcacaaccgagatgagatatggtgaggagccggaagaggaaccgaaagtgaaaacccagtggccgaggtctgcagatgagcctgggctatacatggcgcagacaggcgacccggcggctgaggagtggtccccgtggagcgtgtgttccctgacgtgtgggcagggtctgcaggtgcggacccgctcctgtgtgtcctccccctatgggaccctgtgcagcgggcccctgcgggagaccaggccctgcaacaattcagccacctgcccagtgcacggcgtgtgggaggagtgggggtcctggagcctgtgctcccgcagctgcgggcgggggtcccggagccggatgcggacctgcgtgcccccccagcacggcggcaaggcctgcgagggtcctgagctgcagactaagctctgcagtatggctgcctgcccggtggaaggccagtggttagaatggggtccctggggcccatgctccacgtcctgtgccaatgggacccaacagcgcagccggaagtgcagcgtggcgggcccagcctgggccacatgcacgggtgccctcactgacacccgggagtgcagcaacctcgagtgcccggccactgatagcaagtgggggccatggaatgcgtggagcctgtgctctaagacgtgtgacacaggctggcagcgccgcttccgcatgtgccaggccacgggcacgcagggctacccctgcgagggcaccggagaggaggtgaagccttgtagtgagaagaggtgtccagccttccatgagatgtgcagggatgagtacgtgatgctgatgacgtggaagaaggcagctgctggcgagatcatctacaacaagtgccccccgaatgcctcagggtctgccagccgccgctgtctcctcagtgcccaaggcgtggcgtactgggggctgcccagctttgctcgctgcatctcccatgagtaccgctacctgtatctgtcacttagggagcacctggccaaggggcagcgcatgctggcaggcgagggcatgtcgcaggtggtgcgcagcctgcaggagctactggcccggcgcacctactatagtggggacctgctcttctctgtggacattctgaggaatgtcactgacacctttaagagggccacctacgtgccctcggctgatgatgtgcagcgcttcttccaggtggtgagcttcatggtggatgcggaaaacaaggagaagtgggacgatgctcagcaggtgtcccctggctctgtgcacctgctccgtgtcgtggaggacttcattcacctggtgggcgatgctctcaaggccttccagagctctctgattgtcacagataatctagtgatcagcattcagcgagagcccgtctcagctgtgtccagtgacatcacgttccccatgcggggccgccggggcatgaaggactgggtgcggcactcagaggaccgcctcttcctgcccaaggaggtgctcagcctctcctccccagggaagccagccacatctggggcagcaggcagccctggcagggggaggggcccaggaacggtgcctcctggcccaggccactcccaccagcgcctcctcccagcagaccctgatgagtcctcctactttgtgatcggtgctgtactctaccgcacccttggcctcatcctgccgcctcccaggcccccgctggccgtcacatcccgggtgatgacagtgactgtgcgcccccctacccagcctccagctgagcccctcatcactgtggagctctcctacatcatcaatgggaccacggatccccattgcgccagctgggactactccagagcagatgccagctcaggagactgggacactgaaaattgccagaccctggagacccaggcagctcacacccgctgccagtgccagcacctgtccacctttgctgtactagcccagccgcccaaggacctgaccctggagctggcgggctccccctcggtccccctggtgatcggctgtgcagtgtcgtgcatggcgctgctcaccctgctcgccatctatgccgccttttggaggttcataaaatctgaacgctccatcatcttgctgaacttctgcctgtccatcttggcatccaacatcctgatcctcgtgggccagtcccgggtgctgagcaagggcgtgtgcaccatgacggctgccttcctgcacttcttctttctctcctccttttgctgggtgcttaccgaggcctggcagtcctacctggctgtcattgggcggatgcgcacccgcctcgttcgcaagcgcttcctctgcctgggctggggtctgcctgccctggtggtggccgtgtctgttggctttacccgaacgaaaggatacggtacatccagctactgctggctctccctggagggcggcctgctctacgcctttgtgggccctgcagccgtcattgtcctggtgaacatgctcatcggaatcatcgtcttcaacaagctcatggcacgtgatggcatctccgacaaatccaagaagcagagggccgggtcggagcggtgcccctgggccagcctgctcctcccctgctcagcgtgtggagcggtccccagccccctgctcagctcagcctcggccaggaacgccatggcctcactctggagctcctgcgtggtgctgcccctgctggcgctcacctggatgtctgccgtcctggctatgacagaccgccgttccgtcctcttccaggccctctttgctgtcttcaactccgcgcagggctttgtcatcactgctgtgcactgcttcctgcgccgagaggtccaggatgtggtgaagtgccagatgggggtgtgccgggctgatgagagcgaagactcccctgactcgtgtaagaacgggcagctgcagatcctgtcagactttgaaaaggatgtggatctggcttgtcaaacagtgctgttcaaggaggtcaacacttgcaacccgtccaccatcacgggcacactatcccgcctgtccctggatgaggatgaggagcccaagtcctgcctcgtgggccctgagggcagcctcagcttctcaccactgcctgggaatatcctggtgcccatggcagcctcaccagggctgggggagcctccgcccccacaggaggccaaccctgtttacatgtgtggggagggtggcctgcggcagctggacctcacatggctgcggcccactgagccaggctctgagggagactacatggtgctgccccggcggactttgagcctgcagcctggcggtgggggtggaggtggtgaggatgcccccagggcccggcccgaggggaccccccggcgagctgccaagacagtggcccacactgaaggctaccccagcttcctgtccgtggaccactcgggcctggggctgggccctgcctatggatctctccagaatccctatggaatgaccttccaaccgccaccgccgacacccagcgcccgccaagtgcccgagccaggggagcgcagccggaccatgcctcgcaccgtgcccggctctaccatgaagatgggctccctggagcgaaagaaattacggtattcagacctggactttgaggtgatgcacacccggaaacggcattcagaactctaccacgagctcaaccagaagttccacactttcgaccgctaccgcagccagtccacggccaagagggagaagcggtggagtgtgtcctcgggtggggcggccgagcggagcgtgtgcaccgataagcccagccctggggagcgccccagcttgtcccaacatcggcgccatcagagctggagcaccttcaaatctatgacactgggctcgctgccccccaagccccgagaacggctgactctgcaccgggcagcagcctgggagcccacagaaccaccggatggtgacttccagacagaggtgtgagtgccacgctggactgcccactgcatataaatatatatatctctctattttcacactccactttggaactacccaggagccagcgccctctcccctctcccgagggctgggcagggaggcgccgtggactcagccaggctgggggagccggacatggcttggcctggggtcccagggcccttccttgtttctcagaggcccctcagccactggaaccccatcttcagcccagcctgtccgtccctgtcccgggctggggaggggggaggggaactttgttgggaataaacttcactctgtgg

SEQ ID NO: 344 - protein, 1572 aa, Homo sapiens
MTPACPLLLSVILSLRLATAFDPAPSACSALASGVLYGAFSLQDLFPTIASGCSWTLENPDPTKYSLYLRFNRQEQVCAHFAPRLLPLDHYLVNFTCLRPSPEEAVAQAESEVGRPEEEEAEAAAGLELCSGSGPFTFLHFDKNFVQLCLSAEPSEAPRLLAPAALAFRFVEVLLINNNNSSQFTCGVLCRWSEECGRAAGRACGFAQPGCSCPGEAGAGSTTTTSPGPPAAHTLSNALVPGGPAPPAEADLHSGSSNDLFTTEMRYGEEPEEEPKVKTQWPRSADEPGLYMAQTGDPAAEEWSPWSVCSLTCGQGLQVRTRSCVSSPYGTLCSGPLRETRPCNNSATCPVHGVWEEWGSWSLCSRSCGRGSRSRMRTCVPPQHGGKACEGPELQTKLCSMAACPVEGQWLEWGPWGPCSTSCANGTQQRSRKCSVAGPAWATCTGALTDTRECSNLECPATDSKWGPWNAWSLCSKTCDTGWQRRFRMCQATGTQGYPCEGTGEEVKPCSEKRCPAFHEMCRDEYVMLMTWKKAAAGEIIYNKCPPNASGSASRRCLLSAQGVAYWGLPSFARCISHEYRYLYLSLREHLAKGQRMLAGEGMSQVVRSLQELLARRTYYSGDLLFSVDILRNVTDTFKRATYVPSADDVQRFFQVVSFMVDAENKEKWDDAQQVSPGSVHLLRVVEDFIHLVGDALKAFQSSLIVTDNLVISIQREPVSAVSSDITFPMRGRRGMKDWVRHSEDRLFLPKEVLSLSSPGKPATSGAAGSPGRGRGPGTVPPGPGHSHQRLLPADPDESSYFVIGAVLYRTLGLILPPPRPPLAVTSRVMTVTVRPPTQPPAEPLITVELSYIINGTTDPHCASWDYSRADASSGDWDTENCQTLETQAAHTRCQCQHLSTFAVLAQPPKDLTLELAGSPSVPLVIGCAVSCMALLTLLAIYAAFWRFIKSERSIILLNFCLSILASNILILVGQSRVLSKGVCTMTAAFLHFFFLSSFCWVLTEAWQSYLAVIGRMRTRLVRKRFLCLGWGLPALVVAVSVGFTRTKGYGTSSYCWLSLEGGLLYAFVGPAAVIVLVNMLIGIIVFNKLMARDGISDKSKKQRAGSERCPWASLLLPCSACGAVPSPLLSSASARNAMASLWSSCVVLPLLALTWMSAVLAMTDRRSVLFQALFAVFNSAQGFVITAVHCFLRREVQDVVKCQMGVCRADESEDSPDSCKNGQLQILSDFEKDVDLACQTVLFKEVNTCNPSTITGTLSRLSLDEDEEPKSCLVGPEGSLSFSPLPGNILVPMAASPGLGEPPPPQEANPVYMCGEGGLRQLDLTWLRPTEPGSEGDYMVLPRRTLSLQPGGGGGGGEDAPRARPEGTPRRAAKTVAHTEGYPSFLSVDHSGLGLGPAYGSLQNPYGMTFQPPPPTPSARQVPEPGERSRTMPRTVPGSTMKMGSLERKKLRYSDLDFEVMHTRKRHSELYHELNQKFHTFDRYRSQSTAKREKRWSVSSGGAAERSVCTDKPSPGERPSLSQHRRHQSWSTFKSMTLGSLPPKPRERLTLHRAAAWEPTEPPDGDFQTEV

SEQ ID NO: 345 - DNA, 5218 bp, Homo sapiens
ggataacaacttacagaggccaaatgacataggatgaaggctgttcgtaacctgctgatttatatattttccacctatctcctggttatgtttggatttaatgctgcccaagacttctggtgttcaactttggtgaagggagtcatttatggatcgtattctgtaagtgaaatgtttcctaaaaactttacaaactgcacttggacgctggaaaatccagatccaaccaaatatagcatttacctgaaattttccaaaaaggaccttagctgctctaacttttcactcctggcttatcagtttgatcatttttcccatgaaaaaataaaggatcttttaagaaagaatcattctataatgcaactctgcaattccaagaatgctttcgtttttctacagtatgataaaaattttattcaaatacgtcgagtatttccaactaatttcccaggattacagaaaaaaggggaagaagatcagaaatctttttttgagtttttggtattgaacaaggtcagcccaagccagtttggttgccatgtattatgtacttggttggagagctgcttaaaatcagaaaatgggagaacagaatcatgtgggatcatgtatacaaaatgcacctgccctcagcatttgggagagtgggggatcgacgaccagtcgctgattttgttaaataacgtggtgttacccctgaatgagcagacagagggctgcctgacccaggagctgcaaaccacccaagtctgcaatcttaccagggaggccaagcgaccacccaaagaagaatttggaatgatgggagatcatacaattaaaagtcagcgacctcgatctgttcatgaaaaaagggtccctcaggaacaagctgatgctgctaaatttatggcacaaactggtgaatctggtgtggaagagtggtcccagtggagcacatgttcggttacttgtggtcaagggtcgcaggtgcgaaccagaacttgtgtatcaccttacgggacacactgcagcggcccattaagagaatcaagggtttgcaataacactgccctctgtccagtacacggagtatgggaggaatggtcaccatggagtttatgttcatttacatgtggtcgaggccaaagaacaagaacaaggtcatgcacacctcctcagtatggaggaaggccgtgtgaaggacctgaaacacatcataagccttgtaatattgctctttgcccagttgatggacagtggcaagagtggagttcgtggagccagtgctcagtaacgtgctcgaatgggactcagcagagaagccggcagtgcactgcagctgcccatggaggctccgaatgcagagggccatgggcagaaagcagagagtgctataaccctgaatgtacagccaatggtcaatggaatcagtggggtcattggagtggttgttccaagtcctgtgatggcggctgggaaaggcgaataaggacctgtcagggtgcagtgataacagggcagcaatgtgaaggaacgggcgaagaagtgagaagatgcagtgagcagcgatgccctgcaccttatgaaatatgccctgaggattatctgatgtcgatggtgtggaaaagaactccagcaggcgacttggcattcaatcaatgtcccctgaatgccacaggcaccactagcagacgctgctctctcagtcttcatggagtggccttctgggaacagccgagctttgcaagatgcatatcaaatgagtacagacacttgcagcattcaattaaagagcaccttgctaaggggcagcgaatgctggcaggtgatggaatgtcccaggtgaccaagacactgttggatttaactcagagaaaaaatttctatgcaggcgatcttctgatgtctgtggagatcctgagaaatgtgacagacacatttaaaagggcaagttacatccctgcatctgatggtgtccagaacttctttcaaatagttagcaaccttctagatgaagaaaacaaggaaaaatgggaagatgcacaacagatttatccagggtcaatagagttaatgcaggtgattgaagattttatacacattgttggaatggggatgatggactttcagaattcatacttaatgactggaaatgtagtggctagtattcagaagcttcctgcagcctctgttctaacagacatcaactttccaatgaaaggacggaagggaatggttgactgggcaagaaactcagaagatagggtagtaattccaaaaagcattttcactccggtgtcatcaaaagaattagatgaatcatctgtatttgttcttggcgcagtcctatacaaaaacttagatctaattttgcccactttgagaaattatactgtcattaattccaaaatcatcgtggtcacaataaggcctgaacccaaaacaaccgattcgtttctggagatagaactagctcatttggctaatggtactttgaatccctattgtgtattgtgggatgactccaaaacgaacgagtctttgggaacgtggtccacccagggatgtaaaactgtgcttaccgatgcatcccatacgaaatgcttatgtgatcgtctctctaccttcgccattttggctcagcaacctagagaaataatcatggaatcctctggcacaccttcagttaccctaatagtaggcagtggtctttcttgcttggccttgattaccctagcagttgtctatgcagcattatggaggtacatacgctctgagagatccataatactaattaacttctgcctgtctatcatctcatccaatatcctcatactggttggacagactcagacacataataagagtatctgcacaaccaccactgcatttttgcactttttcttcctggcttcattctgttgggttttgactgaggcgtggcaatcatatatggctgtaactggaaaaattaggacacggcttataagaaaacgctttttgtgccttggatggggtttaccagcattagtagtggccacatcagtaggcttcaccagaacaaaaggatatggcactgatcactactgctggctctctcttgaaggaggactactctatgcttttgtgggacctgcagccgctgttgtcctggtcaacatggtgattggcattttggtatttaataaacttgtttccagagatggaatcctagataaaaagctcaaacacagagccggtcagatgagtgagcctcatagcggtttgacgctcaaatgtgccaagtgtggagtagtttcaacaacagctttgtcagccaccaccgccagtaacgccatggcgtctctttggagctcctgtgtggtgttgccccttctggctttgacgtggatgtctgcggttctggccatgacagataaacgctccatattgtttcaaatactttttgctgtgtttgattcattgcaaggctttgttatagtcatggtccactgcattcttcggagagaggttcaggatgcatttagatgccgattgagaaactgtcaggatcccatcaatgcagattcttcgagttcgtttcctaatgggcatgctcaaatcatgacagactttgaaaaggatgtagacattgcctgtcgatcagttcttcataaggatattggtccttgccgagcagccacaataacaggaacactttctaggatttctctaaatgatgatgaagaagaaaagggaacaaaccctgaagggctaagctattcaacattgcctggaaatgtcatttccaaagtcatcatccagcaacccacaggtttgcacatgcccatgagtatgaatgagcttagcaatccatgtttgaaaaaagaaaatagtgaattgcggagaactgtgtacttatgtacggatgataatttgagaggggctgacatggacatagtccatcctcaagaaagaatgatggaaagtgactatattgtgatgcccagaagttctgtaaataaccagccttcaatgaaagaagaaagcaaaatgaatattggcatggaaaccttgccacatgaaaggctattgcactacaaagtaaaccctgaattcaatatgaatccccctgtaatggaccagttcaatatgaacttagagcaacatctcgcaccccaggaacatatgcagaatttgccctttgaacctcgcacagctgtgaagaatttcatggcctctgagttggatgataatgcaggactatcaagaagtgaaactggatcaacgatatcaatgagttctttagagagaagaaaatcacgatattcagaccttgactttgagaaggtcatgcatacaaggaagaggcatatggaactatttcaagaactaaatcagaaatttcaaactttggacagatttcgggatataccaaatacaagcagtatggaaaaccccgcaccaaacaagaatccatgggacactttcaaaaaccccagtgaatacccgcattacaccacaatcaatgtcttagacacagaggcaaaggatgctttggaactgaggccagcagagtgggagaagtgtctgaatttgcctctggatgtgcaagagggtgactttcaaacagaagtttaaaaaaatcaaaatggactaaggtagagacaaaactttattgcactgacacttaagacttgggaagcctgacatttctatctggacagtgtgactatcttatgtcaggaccttcatgtgccaaacgtcagtggtgttttcatatggtaacttctcactagtcaggctagtggagagatgaccaggtgtacagttctgaccatcctgtgttgtaagtacccgtggaatggatttgtaaggtaatctttatagataaacctcaagcaacgattcatgttgtaaccgcttcatatggtttagttttcaaaaaacttcaccatgaagcacaatgtatatatttatgcagtttttaaagtttataacagtctgtttggccattactacactttttactttataatataaaagcaaagtttttgtcattaaatgaatgtttgttgagctacattcttcattgctttaaatgcaataaagtaataatctcacttttatatgaataatatatttcacatctttattattgcagttttctctagaaagctctgagaagctttctctgctgcagctgtgtataaaatatttaaaatgttgtatggtgtaaataaacttttgtctacat

SEQ ID NO: 346 - protein, 1522 aa, Homo sapiens
MKAVRNLLIYIFSTYLLVMFGFNAAQDFWCSTLVKGVIYGSYSVSEMFPKNFTNCTWTLENPDPTKYSIYLKFSKKDLSCSNFSLLAYQFDHFSHEKIKDLLRKNHSIMQLCNSKNAFVFLQYDKNFIQIRRVFPTNFPGLQKKGEEDQKSFFEFLVLNKVSPSQFGCHVLCTWLESCLKSENGRTESCGIMYTKCTCPQHLGEWGIDDQSLILLNNVVLPLNEQTEGCLTQELQTTQVCNLTREAKRPPKEEFGMMGDHTIKSQRPRSVHEKRVPQEQADAAKFMAQTGESGVEEWSQWSTCSVTCGQGSQVRTRTCVSPYGTHCSGPLRESRVCNNTALCPVHGVWEEWSPWSLCSFTCGRGQRTRTRSCTPPQYGGRPCEGPETHHKPCNIALCPVDGQWQEWSSWSQCSVTCSNGTQQRSRQCTAAAHGGSECRGPWAESRECYNPECTANGQWNQWGHWSGCSKSCDGGWERRIRTCQGAVITGQQCEGTGEEVRRCSEQRCPAPYEICPEDYLMSMVWKRTPAGDLAFNQCPLNATGTTSRRCSLSLHGVAFWEQPSFARCISNEYRHLQHSIKEHLAKGQRMLAGDGMSQVTKTLLDLTQRKNFYAGDLLMSVEILRNVTDTFKRASYIPASDGVQNFFQIVSNLLDEENKEKWEDAQQIYPGSIELMQVIEDFIHIVGMGMMDFQNSYLMTGNVVASIQKLPAASVLTDINFPMKGRKGMVDWARNSEDRVVIPKSIFTPVSSKELDESSVFVLGAVLYKNLDLILPTLRNYTVINSKIIVVTIRPEPKTTDSFLEIELAHLANGTLNPYCVLWDDSKTNESLGTWSTQGCKTVLTDASHTKCLCDRLSTFAILAQQPREIIMESSGTPSVTLIVGSGLSCLALITLAVVYAALWRYIRSERSIILINFCLSIISSNILILVGQTQTHNKSICTTTTAFLHFFFLASFCWVLTEAWQSYMAVTGKIRTRLIRKRFLCLGWGLPALVVATSVGFTRTKGYGTDHYCWLSLEGGLLYAFVGPAAAVVLVNMVIGILVFNKLVSRDGILDKKLKHRAGQMSEPHSGLTLKCAKCGVVSTTALSATTASNAMASLWSSCVVLPLLALTWMSAVLAMTDKRSILFQILFAVFDSLQGFVIVMVHCILRREVQDAFRCRLRNCQDPINADSSSSFPNGHAQIMTDFEKDVDIACRSVLHKDIGPCRAATITGTLSRISLNDDEEEKGTNPEGLSYSTLPGNVISKVIIQQPTGLHMPMSMNELSNPCLKKENSELRRTVYLCTDDNLRGADMDIVHPQERMMESDYIVMPRSSVNNQPSMKEESKMNIGMETLPHERLLHYKVNPEFNMNPPVMDQFNMNLEQHLAPQEHMQNLPFEPRTAVKNFMASELDDNAGLSRSETGSTISMSSLERRKSRYSDLDFEKVMHTRKRHMELFQELNQKFQTLDRFRDIPNTSSMENPAPNKNPWDTFKNPSEYPHYTTINVLDTEAKDALELRPAEWEKCLNLPLDVQEGDFQTEV

SEQ ID NO: 347 - DNA, 1953 bp, Homo sapiens
gcagaccttgcttcatgagcaagctcatctctggaacaaactggcaaagcatctctgctggtgttcatcagaacagacaccatggcagagcatgattaccatgaagactatgggttcagcagtttcaatgacagcagccaggaggagcatcaagacttcctgcagttcagcaaggtctttctgccctgcatgtacctggtggtgtttgtctgtggtctggtggggaactctctggtgctggtcatatccatcttctaccataagttgcagagcctgacggatgtgttcctggtgaacctacccctggctgacctggtgtttgtctgcactctgcccttctgggcctatgcaggcatccatgaatgggtgtttggccaggtcatgtgcaagagcctactgggcatctacactattaacttctacacgtccatgctcatcctcacctgcatcactgtggatcgtttcattgtagtggttaaggccaccaaggcctacaaccagcaagccaagaggatgacctggggcaaggtcaccagcttgctcatctgggtgatatccctgctggtttccttgccccaaattatctatggcaatgtctttaatctcgacaagctcatatgtggttaccatgacgaggcaatttccactgtggttcttgccacccagatgacactggggttcttcttgccactgctcaccatgattgtctgctattcagtcataatcaaaacactgcttcatgctggaggcttccagaagcacagatctctaaagatcatcttcctggtgatggctgtgttcctgctgacccagatgcccttcaacctcatgaagttcatccgcagcacacactgggaatactatgccatgaccagctttcactacaccatcatggtgacagaggccatcgcatacctgagggcctgccttaaccctgtgctctatgcctttgtcagcctgaagtttcgaaagaacttctggaaacttgtgaaggacattggttgcctcccttaccttggggtctcacatcaatggaaatcttctgaggacaattccaagactttttctgcctcccacaatgtggaggccaccagcatgttccagttataggccttgccagggtttcgagaagctgctctggaatttgcaagtcatggctgtgccctcttgatgtggtgaggcaggctttgtttatagcttgcgcattctcatggagaagttatcagacactctggctggtttggaatgcttcttctcaggcatgaacatgtactgttctcttcttgaacactcatgctgaaagcccaagtagggggtctaaaatttttaaggactttccttcctccatctccaagaatgctgaaaccaagggggatgacatgtgactcctatgatctcaggttctccttgattgggactggggctgaaggttgaagaggtgagcacggccaacaaagctgttgatggtaggtggcacactgggtgcccaagctcagaaggctcttctgactactgggcaaagagtgtagatcagagcagcagtgaaaacaagtgctggcaccaccaggcacctcacagaaatgagatcaggctctgcctcaccttggggcttgacttttgtataggtagatgttcagattgctttgattaatccagaataactagcaccagggactatgaatgggcaaaactgaattataagaggctgataattccagtggtccatggaatgcttgaaaaatgtgcaaaacagcgtttaagactgtaatgaatctaagcagcatttctgaagtggactctttggtggctttgcattttaaaaatgaaattttccaatgtctgccacacaaacgtatgtaaatgtatatacccacacacatacacacatatgtcatatattactagcatatgagtttcatagctaagaaataaaactgttaaagtctccaaact

SEQ ID NO: 348 - protein, 342 aa, Homo sapiens
MAEHDYHEDYGFSSFNDSSQEEHQDFLQFSKVFLPCMYLVVFVCGLVGNSLVLVISIFYHKLQSLTDVFLVNLPLADLVFVCTLPFWAYAGIHEWVFGQVMCKSLLGIYTINFYTSMLILTCITVDRFIVVVKATKAYNQQAKRMTWGKVTSLLIWVISLLVSLPQIIYGNVFNLDKLICGYHDEAISTVVLATQMTLGFFLPLLTMIVCYSVIIKTLLHAGGFQKHRSLKIIFLVMAVFLLTQMPFNLMKFIRSTHWEYYAMTSFHYTIMVTEAIAYLRACLNPVLYAFVSLKFRKNFWKLVKDIGCLPYLGVSHQWKSSEDNSKTFSASHNVEATSMFQL

SEQ ID NO: 349 - DNA, 1159 bp, Homo sapiens
gcccagatggtcatcatgggccagtgctactacaacgagaccatcggcttcttctataacaacagtggcaaagagctcagctcccactggcggcccaaggatgtggtcgtggtggcactggggctgaccgtcagcgtgctggtgctgctgaccaatctgctggtcatagcagccatcgcctccaaccgccgcttccaccagcccatctactacctgctcggcaatctggccgcggctgacctcttcgcgggcgtggcctacctcttcctcatgttccacactggtccccgcacagcccgactttcacttgagggctggttcctgcggcagggcttgctggacacaagcctcactgcgtcggtggccacactgctggccatcgccgtggagcggcaccgcagtgtgatggccgtgcagctgcacagccgcctgccccgtggccgcgtggtcatgctcattgtgggcgtgtgggtggctgccctgggcctggggctgctgcctgcccactcctggcactgcctctgtgccctggaccgctgctcacgcatggcacccctgctcagccgctcctatttggccgtctgggctctgtcgagcctgcttgtcttcctgctcatggtggctgtgtacacccgcattttcttctacgtgcggcggcgagtgcagcgcatggcagagcatgtcagctgccacccccgctaccgagagaccacgctcagcctggtcaagactgttgtcatcatcctgggggcgttcgtggtctgctggacaccaggccaggtggtactgctcctggatggtttaggctgtgagtcctgcaatgtcctggctgtagaaaagtacttcctactgttggccgaggccaactcactggtcaatgctgctgtgtactcttgccgagatgctgagatgcgccgcaccttccgccgccttctctgctgcgcgtgcctccgccagtccacccgcgagtctgtccactatacatcctctgcccagggaggtgccagcactcgcatcatgcttcccgagaacggccacccactgatggactccaccctttagctaccttgaacttcagcggtacgcggcaagcaacaaatccacagcccctgatgacttgtgggtgctcctggctcaacccaaccaacaggactgactg

SEQ ID NO: 350 - protein, 351 aa, Homo sapiens
MVIMGQCYYNETIGFFYNNSGKELSSHWRPKDVVVVALGLTVSVLVLLTNLLVIAAIASNRRFHQPIYYLLGNLAAADLFAGVAYLFLMFHTGPRTARLSLEGWFLRQGLLDTSLTASVATLLAIAVERHRSVMAVQLHSRLPRGRVVMLIVGVWVAALGLGLLPAHSWHCLCALDRCSRMAPLLSRSYLAVWALSSLLVFLLMVAVYTRIFFYVRRRVQRMAEHVSCHPRYRETTLSLVKTVVIILGAFVVCWTPGQVVLLLDGLGCESCNVLAVEKYFLLLAEANSLVNAAVYSCRDAEMRRTFRRLLCCACLRQSTRESVHYTSSAQGGASTRIMLPENGHPLMDSTL

SEQ ID NO: 351 - DNA, 3655 bp, Homo sapiens
cttcagatagattatatctggagtgaaggatcctgccacctacgtatctggcatagtattctgtgtagtgggatgagcagagaacaaaaacaaaataatccagtgagaaaagcccgtaaataaaccttcagaccagagatctattctccagcttattttaagctcaacttaaaaagaagaactgttctctgattcttttcgccttcaatacacttaatgatttaactccaccctccttcaaaagaaacagcatttcctacttttatactgtctatatgattgatttgcacagctcatctggccagaagagctgagacatccgttcccctacaagaaactctccccgggtggaacaagatggattatcaagtgtcaagtccaatctatgacatcaattattatacatcggagccctgccaaaaaatcaatgtgaagcaaatcgcagcccgcctcctgcctccgctctactcactggtgttcatctttggttttgtgggcaacatgctggtcatcctcatcctgataaactgcaaaaggctgaagagcatgactgacatctacctgctcaacctggccatctctgacctgtttttccttcttactgtccccttctgggctcactatgctgccgcccagtgggactttggaaatacaatgtgtcaactcttgacagggctctattttataggcttcttctctggaatcttcttcatcatcctcctgacaatcgataggtacctggctgtcgtccatgctgtgtttgctttaaaagccaggacggtcacctttggggtggtgacaagtgtgatcacttgggtggtggctgtgtttgcgtctctcccaggaatcatctttaccagatctcaaaaagaaggtcttcattacacctgcagctctcattttccatacagtcagtatcaattctggaagaatttccagacattaaagatagtcatcttggggctggtcctgccgctgcttgtcatggtcatctgctactcgggaatcctaaaaactctgcttcggtgtcgaaatgagaagaagaggcacagggctgtgaggcttatcttcaccatcatgattgtttattttctcttctgggctccctacaacattgtccttctcctgaacaccttccaggaattctttggcctgaataattgcagtagctctaacaggttggaccaagctatgcaggtgacagagactcttgggatgacgcactgctgcatcaaccccatcatctatgcctttgtcggggagaagttcagaaactacctcttagtcttcttccaaaagcacattgccaaacgcttctgcaaatgctgttctattttccagcaagaggctcccgagcgagcaagctcagtttacacccgatccactggggagcaggaaatatctgtgggcttgtgacacggactcaagtgggctggtgacccagtcagagttgtgcacatggcttagttttcatacacagcctgggctgggggtggggtgggagaggtcttttttaaaaggaagttactgttatagagggtctaagattcatccatttatttggcatctgtttaaagtagattagatcttttaagcccatcaattatagaaagccaaatcaaaatatgttgatgaaaaatagcaacctttttatctccccttcacatgcatcaagttattgacaaactctcccttcactccgaaagttccttatgtatatttaaaagaaagcctcagagaattgctgattcttgagtttagtgatctgaacagaaataccaaaattatttcagaaatgtacaactttttacctagtacaaggcaacatataggttgtaaatgtgtttaaaacaggtctttgtcttgctatggggagaaaagacatgaatatgattagtaaagaaatgacacttttcatgtgtgatttcccctccaaggtatggttaataagtttcactgacttagaaccaggcgagagacttgtggcctgggagagctggggaagcttcttaaatgagaaggaatttgagttggatcatctattgctggcaaagacagaagcctcactgcaagcactgcatgggcaagcttggctgtagaaggagacagagctggttgggaagacatggggaggaaggacaaggctagatcatgaagaaccttgacggcattgctccgtctaagtcatgagctgagcagggagatcctggttggtgttgcagaaggtttactctgtggccaaaggagggtcaggaaggatgagcatttagggcaaggagaccaccaacagccctcaggtcagggtgaggatggcctctgctaagctcaaggcgtgaggatgggaaggagggaggtattcgtaaggatgggaaggagggaggtattcgtgcagcatatgaggatgcagagtcagcagaactggggtggatttggtttggaagtgagggtcagagaggagtcagagagaatccctagtcttcaagcagattggagaaacccttgaaaagacatcaagcacagaaggaggaggaggaggtttaggtcaagaagaagatggattggtgtaaaaggatgggtctggtttgcagagcttgaacacagtctcacccagactccaggctgtctttcactgaatgcttctgacttcatagatttccttcccatcccagctgaaatactgaggggtctccaggaggagactagatttatgaatacacgaggtatgaggtctaggaacatacttcagctcacacatgagatctaggtgaggattgattacctagtagtcatttcatgggttgttgggaggattctatgaggcaaccacaggcagcatttagcacatactacacattcaataagcatcaaactcttagttactcattcagggatagcactgagcaaagcattgagcaaaggggtcccatataggtgagggaagcctgaaaaactaagatgctgcctgcccagtgcacacaagtgtaggtatcattttctgcatttaaccgtcaataggcaaaggggggaagggacatattcatttggaaataagctgccttgagccttaaaacccacaaaagtacaatttaccagcctccgtatttcagactgaatgggggtggggggggcgccttaggtacttattccagatgccttctccagacaaaccagaagcaacagaaaaaatcgtctctccctccctttgaaatgaatataccccttagtgtttgggtatattcatttcaaagggagagagagaggtttttttctgttctttctcatatgattgtgcacatacttgagactgttttgaatttgggggatggctaaaaccatcatagtacaggtaaggtgagggaatagtaagtggtgagaactactcagggaatgaaggtgtcagaataataagaggtgctactgactttctcagcctctgaatatgaacggtgagcattgtggctgtcagcaggaagcaacgaagggaaatgtctttccttttgctcttaagttgtggagagtgcaacagtagcataggaccctaccctctgggccaagtcaaagacattctgacatcttagtatttgcatattcttatgtatgtgaaagttacaaattgcttgaaagaaaatatgcatctaataaaaaacaccttcta

SEQ ID NO: 352 - protein, 352 aa, Homo sapiens [sequence omitted]

SEQ ID NO: 353 - DNA, 1645 bp, Homo sapiens
tcctgctctggggaagtgggcacacgttaaaagaaatgtttatttcagtcttctgaaatagggaattactctggctaaaatgtagctccagaaagggaaagtggggctgtatgaatccaggtccagtttgttgtttcctccaggataaggcagctgtcggaggggaaaatcatctcccatttctccacagggcagtctgaagatggccaattacacgctggcaccagaggatgaatatgatgtcctcatagaaggtgaactggagagcgatgaggcagagcaatgtgacaagtatgacgcccaggcactctcagcccagctggtgccatcactctgctctgctgtgtttgtgatcggtgtcctggacaatctcctggttgtgcttatcctggtaaaatataaaggactcaaacgcgtggaaaatatctatcttctaaacttggcagtttctaacttgtgtttcttgcttaccctgcccttctgggctcatgctgggggcgatcccatgtgtaaaattctcattggactgtacttcgtgggcctgtacagtgagacatttttcaattgccttctgactgtgcaaaggtacctagtgtttttgcacaagggcaactttttctcagccaggaggagggtgccctgtggcatcattacaagtgtcctggcatgggtaacagccattctggccactttgcctgaatacgtggtttataaacctcagatggaagaccagaaatacaagtgtgcatttagcagaactcccttcctgccagctgatgagacattctggaagcattttctgactttaaaaatgaacatttcggttcttgtcctccccctatttatttttacatttctctatgtgcaaatgagaaaaacactaaggttcagggagcagaggtatagccttttcaagcttgtttttgccataatggtagtcttccttctgatgtgggcgccctacaatattgcatttttcctgtccactttcaaagaacacttctccctgagtgactgcaagagcagctacaatctggacaaaagtgttcacatcactaaactcatcgccaccacccactgctgcatcaaccctctcctgtatgcgtttcttgatgggacatttagcaaatacctctgccgctgtttccatctgcgtagtaacaccccacttcaacccagggggcagtctgcacaaggcacatcgagggaagaacctgaccattccaccgaagtgtaaactagcatccaccaaatgcaagaagaataaacatggattttcatctttctgcattatttcatgtaaattttctacacatttgtatacaaaatcggatacaggaagaaaagggagaggtgagctaacatttgctaagcactgaatttgtctcaggcaccgtgcaaggctctttacaaacgtgagctccttcgcctcctaccacttgtccatagtgtggataggactagtctcatttctctgagaagaaaactaaggcgcggaaatttgtctaagatcacataactaggaagtggcagaactgattctccagccctggtagcatttgctcagagcctacgcttggtccagaacatcaaactccaaaccctggggacaaacgacatgaaataaatgtattttaaaacatct

SEQ ID NO: 354 - protein, 344 aa, Homo sapiens
MANYTLAPEDEYDVLIEGELESDEAEQCDKYDAQALSAQLVPSLCSAVFVIGVLDNLLVVLILVKYKGLKRVENIYLLNLAVSNLCFLLTLPFWAHAGGDPMCKILIGLYFVGLYSETFFNCLLTVQRYLVFLHKGNFFSARRRVPCGIITSVLAWVTAILATLPEYVVYKPQMEDQKYKCAFSRTPFLPADETFWKHFLTLKMNISVLVLPLFIFTFLYVQMRKTLRFREQRYSLFKLVFAIMVVFLLMWAPYNIAFFLSTFKEHFSLSDCKSSYNLDKSVHITKLIATTHCCINPLLYAFLDGTFSKYLCRCFHLRSNTPLQPRGQSAQGTSREEPDHSTEV

SEQ ID NO: 355 - DNA, 1842 bp, Homo sapiens
atgcgagccccgggcgcgcttctcgcccgcatgtcgcggctactgcttctgctactgctcaaggtgtctgcctcttctgccctcggggtcgcccctgcgtccagaaacgaaacttgtctgggggagagctgtgcacctacagtgatccagcgccgcggcagggacgcctggggaccgggaaattctgcaagagacgttctgcgagcccgagcacccagggaggagcagggggcagcgtttcttgcgggaccctcctgggacctgccggcggccccgggccgtgacccggctgcaggcagaggggcggaggcgtcggcagccggacccccgggacctccaaccaggccacctggcccctggaggtggaaaggtgctcggggtcaggagccttctgaaactttggggagagggaaccccacggccctccagctcttccttcagatctcagaggaggaagagaagggtcccagaggcgctggcatttccgggcgtagccaggagcagagtgtgaagacagtccccggagccagcgatcttttttactggccaaggagagccgggaaactccagggttcccaccacaagcccctgtccaagacggccaatggactggcggggcacgaagggtggacaattgcactcccgggccgggcgctggcccagaatggatccttgggtgaaggaatccatgagcctgggggtccccgccggggaaacagcacgaaccggcgtgtgagactgaagaaccccttctacccgctgacccaggagtcctatggagcctacgcggtcatgtgtctgtccgtggtgatcttcgggaccggcatcattggcaacctggcggtgatgtgcatcgtgtgccacaactactacatgcggagcatctccaactccctcttggccaacctggccttctgggactttctcatcatcttcttctgccttccgctggtcatcttccacgagctgaccaagaagtggctgctggaggacttctcctgcaagatcgtgccctatatagaggtcgcttctctgggagtcaccaccttcaccttatgtgctctgtgcatagaccgcttccgtgctgccaccaacgtacagatgtactacgaaatgatcgaaaactgttcctcaacaactgccaaacttgctgttatatgggtgggagctctattgttagcacttccagaagttgttctccgccagctgagcaaggaggatttggggtttagtggccgagctccggcagaaaggtgcattattaagatctctcctgatttaccagacaccatctatgttctagccctcacctacgacagtgcgagactgtggtggtattttggctgttacttttgtttgcccacgcttttcaccatcacctgctctctagtgactgcgaggaaaatccgcaaagcagagaaagcctgtacccgagggaataaacggcagattcaactagagagtcagatgaactgtacagtagtggcactgaccattttatatggattttgcattattcctgaaaatatctgcaacattgttactgcctacatggctacaggggtttcacagcagacaatggacctccttaatatcatcagccagttccttttgttctttaagtcctgtgtcaccccagtcctccttttctgtctctgcaaacccttcagtcgggccttcatggagtgctgctgctgttgctgtgaggaatgcattcagaagtcttcaacggtgaccagtgatgacaatgacaacgagtacaccacggaactcgaactctcgcctttcagtaccatacgccgtgaaatgtccacttttgcttctgtcggaactcattgctga

SEQ ID NO: 356 - protein, 613 aa, Homo sapiens
MRAPGALLARMSRLLLLLLLKVSASSALGVAPASRNETCLGESCAPTVIQRRGRDAWGPGNSARDVLRARAPREEQGAAFLAGPSWDLPAAPGRDPAAGRGAEASAAGPPGPPTRPPGPWRWKGARGQEPSETLGRGNPTALQLFLQISEEEEKGPRGAGISGRSQEQSVKTVPGASDLFYWPRRAGKLQGSHHKPLSKTANGLAGHEGWTIALPGRALAQNGSLGEGIHEPGGPRRGNSTNRRVRLKNPFYPLTQESYGAYAVMCLSVVIFGTGIIGNLAVMCIVCHNYYMRSISNSLLANLAFWDFLIIFFCLPLVIFHELTKKWLLEDFSCKIVPYIEVASLGVTTFTLCALCIDRFRAATNVQMYYEMIENCSSTTAKLAVIWVGALLLALPEVVLRQLSKEDLGFSGRAPAERCIIKISPDLPDTIYVLALTYDSARLWWYFGCYFCLPTLFTITCSLVTARKIRKAEKACTRGNKRQIQLESQMNCTVVALTILYGFCIIPENICNIVTAYMATGVSQQTMDLLNIISQFLLFFKSCVTPVLLFCLCKPFSRAFMECCCCCCEECIQKSSTVTSDDNDNEYTTELELSPFSTIRREMSTFASVGTHC

SEQ ID NO: 357 - DNA, 1014 bp, Homo sapiens
atgagagctgtcttcatccaaggtgctgaagagcaccctgcggcattctgctaccaggtgaatgggtcttgccccaggacagtacatactctgggcatccagttggtcatctacctgacctgtgcagcaggcatgctgattatcgtgctagggaatgtatttgtggcatttgctgtgtcctacttcaaagcgcttcacacgcccaccaacttcctgctgctctccctggccctggctgacatgtttctgggtctgctggtgctgcccctcagcaccattcgctcagtggagagctgctggttcttcggggacttcctctgccgcctgcacacctacctggacaccctcttctgcctcacctccatcttccatctctgtttcatttccattgaccgccactgtgccatctgtgaccccctgctctatccctccaagttcacagtgagggtggctctcaggtacatcctggcaggatggggggtgcccgcagcatacacttcgttattcctctacacagatgtggtagagacaaggctcagccagtggctggaagagatgccttgtgtgggcagttgccagctgctgctcaataaattttggggctggttaaacttccctttgttctttgtcccctgcctcattatgatcagcttgtatgtgaagatctttgtggttgctaccagacaggctcagcagattaccacattgagcaaaagcctggctggggctgccaagcatgagagaaaagctgccaagaccctgggcattgttgtgggcatatacctcttgtgctggctgcccttcaccatagacacgatggtcgacagcctccttcactttatcacacccccactggtctttgacatctttatctggtttgcttacttcaactcagcctgcaaccccatcatctatgtcttttcctaccagtggtttcggaaggcactgaaactcacactgagccagaaggtcttctcaccgcagacacgcactgttgatttgtaccaagaatga

SEQ ID NO: 358 - protein, 337 aa, Homo sapiens
MRAVFIQGAEEHPAAFCYQVNGSCPRTVHTLGIQLVIYLTCAAGMLIIVLGNVFVAFAVSYFKALHTPTNFLLLSLALADMFLGLLVLPLSTIRSVESCWFFGDFLCRLHTYLDTLFCLTSIFHLCFISIDRHCAICDPLLYPSKFTVRVALRYILAGWGVPAAYTSLFLYTDVVETRLSQWLEEMPCVGSCQLLLNKFWGWLNFPLFFVPCLIMISLYVKIFVVATRQAQQITTLSKSLAGAAKHERKAAKTLGIVVGIYLLCWLPFTIDTMVDSLLHFITPPLVFDIFIWFAYFNSACNPIIYVFSYQWFRKALKLTLSQKVFSPQTRTVDLYQE

SEQ ID NO: 359 - DNA, 1998 bp, Homo sapiens
cggcgcgatgcgcggagacccccgcgggggcggcggcggccgtgagccccgatgaggcccgagcgtccccggccgcgcggcagcgcccccggcccgatggagaccccgccgtgggacccagcccgcaacgactcgctgccgcccacgctgaccccggccgtgcccccctacgtgaagcttggcctcaccgtcgtctacaccgtgttctacgcgctgctcttcgtgttcatctacgtgcagctctggctggtgctgcgttaccgccacaagcggctcagctaccagagcgtcttcctctttctctgcctcttctgggcctccctgcggaccgtcctcttctccttctacttcaaagacttcgtggcggccaattcgctcagccccttcgtcttctggctgctctactgcttccctgtgtgcctgcagtttttcaccctcacgctgatgaacttgtacttcacgcaggtgattttcaaagccaagtcaaaatattctccagaattactcaaataccggttgcccctctacctggcctccctcttcatcagccttgttttcctgttggtgaatttaacctgtgctgtgctggtaaagacgggaaattgggagaggaaggttatcgtctctgtgcgagtggccattaatgacacgctcttcgtgctgtgtgccgtctctctctccatctgtctctacaaaatctctaagatgtccttagccaacatttacttggagtccaagggctcctccgtgtgtcaagtgactgccatcggtgtcaccgtgatactgctttacacctctcgggcctgctacaacctgttcatcctgtcattttctcagaacaagagcgtccattcctttgattatgactggtacaatgtatcagaccaggcagatttgaagaatcagctgggagatgctggatacgtattatttggagtggtgttatttgtttgggaactcttacctaccaccttagtcgtttatttcttccgagttagaaatcctacaaaggaccttaccaaccctggaatggtccccagccatggattcagtcccagatcttatttctttgacaaccctcgaagatatgacagtgatgatgaccttgcctggaacattgcccctcagggacttcagggaggttttgctccagattactatgattggggacaacaaactaacagcttcctggcacaagcaggaactttgcaagactcaactttggatcctgacaaaccaagccttgggtagcatcagttaacagttttatggacgattcctcagatgaaaagcttcagaaaagcatagtgacagctgaatttttagggcacttttccttaagaaatagaacttgatttttatttgttacaggtttccaatggccccataggaataagcaataatgtagactgataaacccttattttagtactaaagagggagccttgctatttcagtgggtataatttaaactttttaaagaaaatctgtacttttataaagatgtattttgtataacttaaataataatgctaaagtatactagggtttttttttcttgagaatgttactgcaatcatgttgtagtttgcacagacttttatgcataattcactttaaaaatatagaatatatggtctaatagttttttaaagcttttggactaaagtattccacaaatcttacctctttaggtcactgatggtcactccgattctgagtgccacattggtagactcctaaaatacagttgacaacttagccaattgcaactccagtgttgataattaaaatgaaatggtaaagcagcagactgtaaggtctttagagatttttttttaaggttcaggccgtaggttcctcaaggaatctcttaagttttgcccaaagactggtacttcctttcagtagggcgctaatgtatacacattaatgataagttgataacattaaaaatgtagctgacttatcctattaaacctcctctgctatgttcac

SEQ ID NO: 360 - protein, 399 aa, Homo sapiens
MRPERPRPRGSAPGPMETPPWDPARNDSLPPTLTPAVPPYVKLGLTVVYTVFYALLFVFIYVQLWLVLRYRHKRLSYQSVFLFLCLFWASLRTVLFSFYFKDFVAANSLSPFVFWLLYCFPVCLQFFTLTLMNLYFTQVIFKAKSKYSPELLKYRLPLYLASLFISLVFLLVNLTCAVLVKTGNWERKVIVSVRVAINDTLFVLCAVSLSICLYKISKMSLANIYLESKGSSVCQVTAIGVTVILLYTSRACYNLFILSFSQNKSVHSFDYDWYNVSDQADLKNQLGDAGYVLFGVVLFVWELLPTTLVVYFFRVRNPTKDLTNPGMVPSHGFSPRSYFFDNPRRYDSDDDLAWNIAPQGLQGGFAPDYYDWGQQTNSFLAQAGTLQDSTLDPDKPSLG

SEQ ID NO: 361 - DNA, 1116 bp, Homo sapiens
atggatcgaggtgccaagtcctgccctgccaacttcttggcagctgccgacgacaaactcagtgggttccagggggacttcctgtggcccatactggtggttgagttcctggtggccgtggccagcaatggcctggccctgtaccgcttcagcatccggaagcagcgcccatggcaccccgccgtggtcttctctgtccagctggcagtcagcgacctgctctgcgctctgacgctgcccccgctggccgcctacctctatccccccaagcactggcgctatggggaggccgcgtgccgcctggagcgcttcctcttcacctgcaacctgctgggcagcgtcatcttcatcacctgcatcagcctcaaccgctacctgggcatcgtgcaccccttcttcgcccgaagccacctgcgacccaagcacgcctgggccgtgagcgctgccggctgggtcctggccgccctgctggccatgcccacactcagcttctcccacctgaagaggccgcagcagggggcgggcaactgcagcgtggccaggcccgaggcctgcatcaagtgtctggggacagcagaccacgggctggcggcctacagagcgtatagcctggtgctggcggggttgggctgcggcctgccgctgctgctcacgctggcagcctacggcgccctcgggcgggccgtgctacgcagcccaggcatgactgtggccgagaagctgcgtgtggcagcgttggtggccagtggtgtggccctctacgccagctcctatgtgccctaccacatcatgcgggtgctcaacgtggatgctcggcggcgctggagcacccgctgcccgagctttgcagacatagcccaggccacagcagccctggagctggggccctacgtgggctaccaggtgatgcggggcctcatgcccctggccttctgtgtccaccctctactctacatggccgcagtgcccagcctgggctgctgctgccgacactgccccggctacagggacagctggaacccagaggacgccaagagcactggccaagccctgcccctcaatgccacagccgcccctaaaccgtcagagccccagtcccgtgagctgagccaatga

SEQ ID NO: 362 - protein, 371 aa, Homo sapiens
MDRGAKSCPANFLAAADDKLSGFQGDFLWPILVVEFLVAVASNGLALYRFSIRKQRPWHPAVVFSVQLAVSDLLCALTLPPLAAYLYPPKHWRYGEAACRLERFLFTCNLLGSVIFITCISLNRYLGIVHPFFARSHLRPKHAWAVSAAGWVLAALLAMPTLSFSHLKRPQQGAGNCSVARPEACIKCLGTADHGLAAYRAYSLVLAGLGCGLPLLLTLAAYGALGRAVLRSPGMTVAEKLRVAALVASGVALYASSYVPYHIMRVLNVDARRRWSTRCPSFADIAQATAALELGPYVGYQVMRGLMPLAFCVHPLLYMAAVPSLGCCCRHCPGYRDSWNPEDAKSTGQALPLNATAAPKPSEPQSRELSQ

SEQ ID NO: 363 - DNA, 1362 bp, Homo sapiens
atggcttcacccagcctcccgggcagtgactgctcccaaatcattgatcacagtcatgtccccgagtttgaggtggccacctggatcaaaatcacccttattctggtgtacctgatcatcttcgtgatgggccttctggggaacagcgccaccattcgggtcacccaggtgctgcagaagaaaggatacttgcagaaggaggtgacagaccacatggtgagtttggcttgctcggacatcttggtgttcctcatcggcatgcccatggagttctacagcatcatctggaatcccctgaccacgtccagctacaccctgtcctgcaagctgcacactttcctcttcgaggcctgcagctacgctacgctgctgcacgtgctgacactcagctttgagcgctacatcgccatctgtcaccccttcaggtacaaggctgtgtcgggaccttgccaggtgaagctgctgattggcttcgtctgggtcacctccgccctggtggcactgcccttgctgtttgccatgggtactgagtaccccctggtgaacgtgcccagccaccggggtctcacttgcaaccgctccagcacccgccaccacgagcagcccgagacctccaatatgtccatctgtaccaacctctccagccgctggaccgtgttccagtccagcatcttcggcgccttcgtggtctacctcgtggtcctgctctccgtagccttcatgtgctggaacatgatgcaggtgctcatgaaaagccagaagggctcgctggccgggggcacgcggcctccgcagctgaggaagtccgagagcgaagagagcaggaccgccaggaggcagaccatcatcttcctgaggctgattgttgtgacattggccgtatgctggatgcccaaccagattcggaggatcatggctgcggccaaacccaagcacgactggacgaggtcctacttccgggcgtacatgatcctcctccccttctcggagacgtttttctacctcagctcggtcatcaacccgctcctgtacacggtgtcctcgcagcagtttcggcgggtgttcgtgcaggtgctgtgctgccgcctgtcgctgcagcacgccaaccacgagaagcgcctgcgcgtacatgcgcactccaccaccgacagcgcccgctttgtgcagcgcccgttgctcttcgcgtcccggcgccagtcctctgcaaggagaactgagaagattttcttaagcacttttcagagcgaggccgagccccagtctaagtcccagtcattgagtctcgagtcactagagcccaactcaggcgcgaaaccagccaattctgctgcagagaatggttttcaggagcatgaagtttga

SEQ ID NO: 364 - protein, 453 aa, Homo sapiens
MASPSLPGSDCSQIIDHSHVPEFEVATWIKITLILVYLIIFVMGLLGNSATIRVTQVLQKKGYLQKEVTDHMVSLACSDILVFLIGMPMEFYSIIWNPLTTSSYTLSCKLHTFLFEACSYATLLHVLTLSFERYIAICHPFRYKAVSGPCQVKLLIGFVWVTSALVALPLLFAMGTEYPLVNVPSHRGLTCNRSSTRHHEQPETSNMSICTNLSSRWTVFQSSIFGAFVVYLVVLLSVAFMCWNMMQVLMKSQKGSLAGGTRPPQLRKSESEESRTARRQTIIFLRLIVVTLAVCWMPNQIRRIMAAAKPKHDWTRSYFRAYMILLPFSETFFYLSSVINPLLYTVSSQQFRRVFVQVLCCRLSLQHANHEKRLRVHAHSTTDSARFVQRPLLFASRRQSSARRTEKIFLSTFQSEAEPQSKSQSLSLESLEPNSGAKPANSAAENGFQEHEV

SEQ ID NO: 365 - DNA, 1309 bp, Homo sapiens
ggacaggtgccccgggagcttcccgctcgcgaagacccagacggctgcaggagcccgggcagcctcggggtcagcggcaccatgaacgtctcgggctgcccaggggccgggaacgcgagccaggcgggcggcgggggaggctggcaccccgaggcggtcatcgtgcccctgctcttcgcgctcatcttcctcgtgggcaccgtgggcaacacgctggtgctggcggtgctgctgcgcggcggccaggcggtcagcactaccaacctgttcatccttaacctgggcgtggccgacctgtgtttcatcctgtgctgcgtgcccttccaggccaccatctacaccctggacggctgggtgttcggctcgctgctgtgcaaggcggtgcacttcctcatcttcctcaccatgcacgccagcagcttcacgctggccgccgtctccctggacaggtatctggccatccgctacccgctgcactcccgcgagctgcgcacgcctcgaaacgcgctggcagccatcgggctcatctgggggctgtcgctgctcttctccgggccctacctgagctactaccgccagtcgcagctggccaacctgaccgtgtgccatcccgcgtggagcgcccctcgccgccgcgccatggacatctgcaccttcgtcttcagctacctgcttcctgtgctggttctcggcctgacctacgcgcgcaccttgcgctacctctggcgcgccgtcgacccggtggccgcgggctcgggtgcccggcgcgccaagcgcaaggtgacacgcatgatcctcatcgtggccgcgctcttctgcctctgctggatgccccaccacgcgctcatcctctgcgtgtggttcggccagttcccgctcacgcgcgccacttatgcgcttcgcatcctctcgcacctggtctcctacgccaactcctgcgtcaaccccatcgtttacgcgctggtctccaagcacttccgcaaaggcttccgcacgatctgcgcgggcctgctgggccgtgccccaggccgagcctcgggccgtgtgtgcgctgccgcgcggggcacccacagtggcagcgtgttggagcgcgagtccagcgacctgttgcacatgagcgaggcggcgggggcccttcgtccctgccccggcgcttcccagccatgcatcctcgagccctgtcctggcccgtcctggcagggcccaaaggcaggcgacagcatcctgacggttgatgtggcctgaaagcacttagcgggcgcgctgggatgtcacagagttggagtcattgttgggggaccgtgggccg

SEQ ID NO: 366 - protein, 387 aa, Homo sapiens
MNVSGCPGAGNASQAGGGGGWHPEAVIVPLLFALIFLVGTVGNTLVLAVLLRGGQAVSTTNLFILNLGVADLCFILCCVPFQATIYTLDGWVFGSLLCKAVHFLIFLTMHASSFTLAAVSLDRYLAIRYPLHSRELRTPRNALAAIGLIWGLSLLFSGPYLSYYRQSQLANLTVCHPAWSAPRRRAMDICTFVFSYLLPVLVLGLTYARTLRYLWRAVDPVAAGSGARRAKRKVTRMILIVAALFCLCWMPHHALILCVWFGQFPLTRATYALRILSHLVSYANSCVNPIVYALVSKHFRKGFRTICAGLLGRAPGRASGRVCAAARGTHSGSVLERESSDLLHMSEAAGALRPCPGASQPCILEPCPGPSWQGPKAGDSILTVDVA

SEQ ID NO: 367 - DNA, 1564 bp, Homo sapiens
cctcccttcaggaagtttgaggctgagacccgaaaagacctgggtgcaagcctccaggcaccctgaagggagtgggctgagggctggcccaagctccctcctctccctctgtagagcctaggatgcccctctgctgcagcggctcctgagctcatggagccctcagccaccccaggggcccagatgggggtcccccctggcagcagagagccgtcccctgtgcctccagactatgaagatgagtttctccgctatctgtggcgtgattatctgtacccaaaacagtatgagtgggtcctcatcgcagcctatgtggctgtgttcgtcgtggccctggtgggcaacacgctggtctgcctggccgtgtggcggaaccaccacatgaggacagtcaccaactacttcattgtcaacctgtccctggctgacgttctggtgactgctatctgcctgccggccagcctgctggtggacatcactgagtcctggctgttcggccatgccctctgcaaggtcatcccctatctacaggctgtgtccgtgtcagtggcagtgctaactctcagcttcatcgccctggaccgctggtatgccatctgccacccactattgttcaagagcacagcccggcgggcccgtggctccatcctgggcatctgggctgtgtcgctggccatcatggtgccccaggctgcagtcatggaatgcagcagtgtgctgcctgagctagccaaccgcacacggctcttctcagtctgtgatgaacgctgggcagatgacctctatcccaagatctaccacagttgcttctttattgtcacctacctggccccactgggcctcatggccatggcctatttccagatattccgcaagctctggggccgccagatccccggcaccacctcagcactggtgcggaactggaagcgcccctcagaccagctgggggacctggagcagggcctgagtggagagccccagccccggggccgcgccttcctggctgaagtgaagcagatgcgtgcacggaggaagacagccaagatgctgatggtggtgctgctggtcttcgccctctgctacctgcccatcagcgtcctcaatgtccttaagagggtgttcgggatgttccgccaagccagtgaccgcgaagctgtctacgcctgcttcaccttctcccactggctggtgtacgccaacagcgctgccaaccccatcatctacaacttcctcagtggcaaattccgggagcagtttaaggctgccttctcctgctgcctgcctggcctgggtccctgcggctctctgaaggcccctagtccccgctcctctgccagccacaagtccttgtccttgcagagccgatgctccatctccaaaatctctgagcatgtggtgctcaccagcgtcaccacagtgctgccctgagcgagggctgccctggaggctccggctcgggggatctgcccctacccctcatggaaagacagctggatgtggtgaaaggctgtggcttcagtcctgggtttctgcctgtgtgactctggataagtcacttcct

SEQ ID NO: 368 - protein, 425 aa, Homo sapiens
MEPSATPGAQMGVPPGSREPSPVPPDYEDEFLRYLWRDYLYPKQYEWVLIAAYVAVFVVALVGNTLVCLAVWRNHHMRTVTNYFIVNLSLADVLVTAICLPASLLVDITESWLFGHALCKVIPYLQAVSVSVAVLTLSFIALDRWYAICHPLLFKSTARRARGSILGIWAVSLAIMVPQAAVMECSSVLPELANRTRLFSVCDERWADDLYPKIYHSCFFIVTYLAPLGLMAMAYFQIFRKLWGRQIPGTTSALVRNWKRPSDQLGDLEQGLSGEPQPRGRAFLAEVKQMRARRKTAKMLMVVLLVFALCYLPISVLNVLKRVFGMFRQASDREAVYACFTFSHWLVYANSAANPIIYNFLSGKFREQFKAAFSCCLPGLGPCGSLKAPSPRSSASHKSLSLQSRCSISKISEHVVLTSVTTVLP

SEQ ID NO: 369 - DNA, 1843 bp, Homo sapiens
ggggggggggtaattgagcttcagctgagccggacgtagctttctcctcctggtgtcattgctgcagcctccagtgccgggtccctagttcctcagctgcctatcttcccggtgcaacatcgcctgtaaagacagcaaagccaccgcagaagttgcccggcagaagactccggaggcattggctcagtaacttttcacgtcattttctgctcgggagccccttctagcctctccgcgcagcctttcccaccgcaaatcaccagtgctcatggggcaggcggagaggagcttgcagcattgagcggaaccggacttgagcccgtgatgtccggcaccaaattggaggactcccccccttgtcgcaactggtcatctgcttcggagctgaatgaaactcaagagccctttttaaaccccaccgactatgacgacgaggaattcctgcggtacctgtggagggaatacctgcacccgaaagaatatgagtgggtcctgatcgccgggtacatcatcgtgttcgtcgtggctctcattgggaacgtcctggtttgtgtggcagtgtggaagaaccaccacatgaggacggtaaccaactacttcatagtcaatctttctctggctgatgtgctcgtgaccatcacctgccttccagccacactggtcgtggatatcactgagacctggttttttggacagtccctttgcaaagtgattccttatctacagaccgtgtcggtgtctgtgtctgtcctcacactgagctgtatcgccttggatcggtggtatgcaatctgtcaccctttgatgtttaagagcacagcaaagcgggcccgtaacagcattgtcatcatctggattgtctcctgcattataatgattcctcaggccatcgtcatggagtgcagcaccgtgttcccaggcttagccaataaaaccaccctctttacggtgtgtgatgagcgctggggtggtgaaatttatcccaagatgtaccacatctgtttctttctggtgacatacatggcaccactgtgtctcatggtgttggcttatctgcaaatatttcgcaaactctggtgtcgacagatccctggaacatcatctgtagttcagagaaaatggaagcccctgcagcctgtttcacagcctcgagggccaggacagccaacgaagtcccggatgagcgctgtggcggctgaaataaagcagatccgagccagaaggaaaacagcccggatgttgatggttgtgcttttggtatttgcaatttgctatctaccaattagcatcctcaatgtgctaaagagagtatttgggatgtttgcccatactgaagacagagagactgtgtatgcctggtttaccttttcacactggcttgtatatgccaatagtgctgcgaatccaattatttataattttctcagtggaaaatttcgagaggaatttaaagctgcgttttcttgctgttgccttggagttcaccatcgccaggaggatcggctcaccaggggacgaactagcacagagagccggaagtccttgaccactcaaatcagcaactttgataacatatcaaaactttctgagcaagttgtgctcactagcataagcacactcccagcagccaatggagcaggaccacttcaaaactggtagaatatttattcatatgacaaggatacctgagtaaaactatcctttttaaaatcactgggaacagaaattttattatcctatgatgtgaagctaaaattacttgtggatcttttttttttttaatctattgctctttggaaataaaaaaaaagtcagtttaaaatgaaaaaaaaaaaaaaaaaaa

SEQ ID NO: 370 - protein, 444 aa, Homo sapiens
MSGTKLEDSPPCRNWSSASELNETQEPFLNPTDYDDEEFLRYLWREYLHPKEYEWVLIAGYIIVFVVALIGNVLVCVAVWKNHHMRTVTNYFIVNLSLADVLVTITCLPATLVVDITETWFFGQSLCKVIPYLQTVSVSVSVLTLSCIALDRWYAICHPLMFKSTAKRARNSIVIIWIVSCIIMIPQAIVMECSTVFPGLANKTTLFTVCDERWGGEIYPKMYHICFFLVTYMAPLCLMVLAYLQIFRKLWCRQIPGTSSVVQRKWKPLQPVSQPRGPGQPTKSRMSAVAAEIKQIRARRKTARMLMVVLLVFAICYLPISILNVLKRVFGMFAHTEDRETVYAWFTFSHWLVYANSAANPIIYNFLSGKFREEFKAAFSCCCLGVHHRQEDRLTRGRTSTESRKSLTTQISNFDNISKLSEQVVLTSISTLPAANGAGPLQNW

SEQ ID NO: 371 - DNA, 1064 bp, Homo sapiens
ccagctgatattccagcccacagcaatggagccacatgactcctcccacatggactctgagttccgatacactctcttcccgattgtttacagcatcatctttgtgctcggggtcattgctaatggctacgtgctgtgggtctttgcccgcctgtacccttgcaagaaattcaatgagataaagatcttcatggtgaacctcaccatggcggacatgctcttcttgatcaccctgccactttggattgtctactaccaaaaccagggcaactggatactccccaaattcctgtgcaacgtggctggctgccttttcttcatcaacacctactgctctgtggccttcctgggcgtcatcacttataaccgcttccaggcagtaactcggcccatcaagactgctcaggccaacacccgcaagcgtggcatctctttgtccttggtcatctgggtggccattgtgggagctgcatcctacttcctcatcctggactctaccaacacagtgcccgacagtgctggctcaggcaacgtcactcgctgctttgagcattacgagaagggcagcgtgccagtcctcatcatccacatcttcatcgtgttcagcttcttcctggtcttcctcatcatcctcttctgcaacctggtcatcatccgtaccttgctcatgcagccggtgcagcagcagcgcaacgctgaagtcaagcgccgggcgctgtggatggtgtgcacggtcttggcggtgttcatcatctgcttcgtgccccaccacgtggtgcagctgccctggacccttgctgagctgggcttccaggacagcaaattccaccaggccattaatgatgcacatcaggtcaccctctgcctccttagcaccaactgtgtcttagaccctgttatctactgtttcctcaccaagaagttccgcaagcacctcaccgaaaagttctacagcatgcgcagtagccggaaatgctcccgggccaccacggatacggtcactgaagtggttgtgccattcaaccagatccctggcaattccctcaaaaattagtccttgcttc

SEQ ID NO: 372 - protein, 342 aa, Homo sapiens
MEPHDSSHMDSEFRYTLFPIVYSIIFVLGVIANGYVLWVFARLYPCKKFNEIKIFMVNLTMADMLFLITLPLWIVYYQNQGNWILPKFLCNVAGCLFFINTYCSVAFLGVITYNRFQAVTRPIKTAQANTRKRGISLSLVIWVAIVGAASYFLILDSTNTVPDSAGSGNVTRCFEHYEKGSVPVLIIHIFIVFSFFLVFLIILFCNLVIIRTLLMQPVQQQRNAEVKRRALWMVCTVLAVFIICFVPHHVVQLPWTLAELGFQDSKFHQAINDAHQVTLCLLSTNCVLDPVIYCFLTKKFRKHLTEKFYSMRSSRKCSRATTDTVTEVVVPFNQIPGNSLKN

SEQ ID NO: 373 - DNA, 2816 bp, Homo sapiens
tgggggcgtcctccttcgtccccgcccggctgtcaagctgtgttctagcggccgagggaccgaggggggctaagaaagggggcgcccagccatgcagaggcaaaaaggcgctgcggaacggggtccccgtcgccagtgctgaggcaggaggtcggagccacaagtgaggggctgggaagcaggacccagcacgggcgtcttggcaggcggccgggcgcagggccaggctgctggggacgctcagggctttccacccaagccatgggcgctgtcgggcactcgggggtcccctcgtggctccggccactcggcgtgggcattacgttggcttcacatcgccatccagcctcgaagccaacaggactgaaaaatagcttcggccaaacgttctcctcccgctaaggagaggggtcgagtgcgtcagcccgaggggactggagagggatgccctagccctcgaggggcggaggacccgcggttgaaggaggcagcgggagcggagagcgccctccttgaccatcgaatgcctccttctgtgtttccattcctgtcgagtgggctgggccacgctgaccaccctggaggagggacggacgacgctcggcgggctctgaccgtgccgccttcttgtggctgctgactgggatccaggagggagtgggcatggggcgcagccgcgcctccctccctccccgcctcccgggcgccggggttggcgatgtggagacgtgaggggacccgtcggctgctccggcttctccaggactccgccaggcgcccgcgcgtccctcctcacccggaggaggagaggctccgcgcggggctccgaggcgggcggcgcgcggagccggagtcccagcctcgccatgggacataacgggagctggatctctccaaatgccagcgagccgcacaacgcgtccggcgccgaggctgcgggtgtgaaccgcagcgcgctcggggagttcggcgaggcgcagctgtaccgccagttcaccaccaccgtgcaggtcgtcatcttcataggctcgctgctcggaaacttcatggtgttatggtcaacttgccgcacaaccgtgttcaaatctgtcaccaacaggttcattaaaaacctggcctgctcggggatttgtgccagcctggtctgtgtgcccttcgacatcatcctcagcaccagtcctcactgttgctggtggatctacaccatgctcttctgcaaggtcgtcaaatttttgcacaaagtattctgctctgtgaccatcctcagcttccctgctattgctttggacaggtactactcagtcctctatccactggagaggaaaatatctgatgccaagtcccgtgaactggtgatgtacatctgggcccatgcagtggtggccagtgtccctgtgtttgcagtaaccaatgtggctgacatctatgccacgtccacctgcacggaagtctggagcaactccttgggccacctggtgtacgttctggtgtataacatcaccacggtcattgtgcctgtggtggtggtgttcctcttcttgatactgatccgacgggccctgagtgccagccagaagaagaaggtcatcatagcagcgctccggaccccacagaacaccatctctattccctatgcctcccagcgggaggccgagctgcacgccaccctgctctccatggtgatggtcttcatcttgtgtagcgtgccctatgccaccctggtcgtctaccagactgtgctcaatgtccctgacacttccgtcttcttgctgctcactgctgtttggctgcccaaagtctccctgctggcaaaccctgttctctttcttactgtgaacaaatctgtccgcaagtgcttgatagggaccctggtgcaactacaccaccggtacagtcgccgtaatgtggtcagtacagggagtggcatggctgaggccagcctggaacccagcatacgctcgggtagccagctcctggagatgttccacattgggcagcagcagatctttaagcccacagaggatgaggaagagagtgaggccaagtacattggctcagctgacttccaggccaaggagatatttagcacctgcctggagggagagcaggggccacagtttgcgccctctgccccacccctgagcacagtggactctgtatcccaggtggcaccggcagcccctgtggaacctgaaacattccctgataagtattccctgcagtttggctttgggccttttgagttgcctcctcagtggctctcagagacccgaaacagcaagaagcggctgcttccccccttgggcaacaccccagaagagctgatccagacaaaggtgcccaaggtaggcagggtggagcggaagatgagcagaaacaataaagtgagcatttttccaaaggtggattcctagcaaggattgtaaattcttggaagcaacggggggcttccatattcccaccagagtgtgggaatgctgtggccatgtgattgtatgatctccttgcaactcagtgtgagttgattcctccaatatgggccagatgcttttgaatgatagggaaatctacataaaatccagtgtcctctttattgagggagtatatgtatccatctcagtgatccatgtccttagtgaagtccacattattctctgtggggacaagagctgggcagttttgaatgggtcttgaggtgggtaccccatgtgcactttctgaggatgcctcacttccctgggctctgcagagaacacacagagagaagactttcagagctcacaggagcagggagcaggagcactctaagggaattc

SEQ ID NO: 374 - protein, 515 aa, Homo sapiens
MGHNGSWISPNASEPHNASGAEAAGVNRSALGEFGEAQLYRQFTTTVQVVIFIGSLLGNFMVLWSTCRTTVFKSVTNRFIKNLACSGICASLVCVPFDIILSTSPHCCWWIYTMLFCKVVKFLHKVFCSVTILSFPAIALDRYYSVLYPLERKISDAKSRELVMYIWAHAVVASVPVFAVTNVADIYATSTCTEVWSNSLGHLVYVLVYNITTVIVPVVVVFLFLILIRRALSASQKKKVIIAALRTPQNTISIPYASQREAELHATLLSMVMVFILCSVPYATLVVYQTVLNVPDTSVFLLLTAVWLPKVSLLANPVLFLTVNKSVRKCLIGTLVQLHHRYSRRNVVSTGSGMAEASLEPSIRSGSQLLEMFHIGQQQIFKPTEDEEESEAKYIGSADFQAKEIFSTCLEGEQGPQFAPSAPPLSTVDSVSQVAPAAPVEPETFPDKYSLQFGFGPFELPPQWLSETRNSKKRLLPPLGNTPEELIQTKVPKVGRVERKMSRNNKVSIFPKVDS

SEQ ID NO: 375 - DNA, 1957 bp, Homo sapiens
ttgatagggatagaaacacatttggctgcttctatagttaacaagatgctgttacattccttgcctcactagctctgaagactatactagcgggacaaagaaagcacctgagatgagctgagaggagggtaaaggtacacagagatcccctggatatttgttctatgtcctctcaggggctttgctaccactagagaattatccatattaagaacttgcattgatattctgggttctgtttcattttttagggtctcaagagcacgctcaagtcattcacatgtttccatcaaatacagacacagatcagggaagattaaaccctactaatttctcgtcggatgcctcacaacaaggtgccttccaagaactaatggccaaaatatccacccacaacacaaataagcttagaaaatctcttcttacaatcctgacacaatggaagtttccctaaaccacccagcatctaatacaaccagcacaaagaacaacaactcggcatttttttactttgagtcctgtcaacctccttctccagctttactcctattatgcatagcctatactgtggtcttaattgtgggcctttttggaaacctctctctcatcatcatcatctttaagaagcagagaaaagctcagaatttcaccagcatactgattgccaatctctccctctctgataccttggtgtgtgtcatgtgcatccattttactatcatctacactctgatggaccactggatatttggggataccatgtgcagactcacatcctatgtgcagagtgtctcaatctctgtgtccatattctcacttgtattcactgctgtcgaaagatatcagctaattgtgaacccccgtggctggaagcccagtgtgactcatgcctactggggcatcacactgatttggctgttttcccttctgctgtctattcccttcttcctgtcctaccacctcactgatgagcccttccgcaacctctctctccccactgacctctacacccaccaggtggcctgtgtggagaactggccctccaaaaaggaccggctgctcttcaccacctccctttttctgctgcagtattttgttcctctaggcttcatcctcatctgctacttgaagattgttatctgcctccgcaggagaaatgcaaaggtagataagaagaaggaaaatgagggccggctcaatgagaacaagaggatcaacacaatgttgatttccatcgtggtgacctttggagcctgctggctgccccgaatatcttcaatgtcatctttgactggtatcatgaggtgctgatgagctgccaccacgacctggtatttgtagtttgccacttggttgctatggtttccacatgtataaaccctctcttttatggctttctcaacaaaaatttccaaaaggacctggtagtgcttattcaccactgctggtgcttcacacctcaggaaagatgtgaaaatattgccatctccactatgcacacagactccaagaggtctttaagattggctcgtataacaacaggtatatgaaaattgataatgctgaagctcttcttgaatgggagctggacaggtaatggtgggaatagggcaagatgcagaaagaagaaaccagaaccaaaaatagcaactttatacccacttttcctttaggctaagactgcctgtctcatatgtctatccaacacaccctccaacatacacgaacacacataccaccccttttctcttaagaaaataactctaataattcaaacaacctgcccgccatcatttgtggcaaagaatgagaatgagaaagcagagagagaggcaaacagcagtgatggctggggaacaatgttcacagatacttttattcaatggaatatctacaaaagttatgactaatgatatgcctagtaaaaacactgctatacctccttagcactgagaat

SEQ ID NO: 376 - protein, 290 aa, Homo sapiens
MEVSLNHPASNTTSTKNNNSAFFYFESCQPPSPALLLLCIAYTVVLIVGLFGNLSLIIIIFKKQRKAQNFTSILIANLSLSDTLVCVMCIHFTIIYTLMDHWIFGDTMCRLTSYVQSVSISVSIFSLVFTAVERYQLIVNPRGWKPSVTHAYWGITLIWLFSLLLSIPFFLSYHLTDEPFRNLSLPTDLYTHQVACVENWPSKKDRLLFTTSLFLLQYFVPLGFILICYLKIVICLRRRNAKVDKKKENEGRLNENKRINTMLISIVVTFGACWLPRISSMSSLTGIMRC

SEQ ID NO: 377 - DNA, 2752 bp, Homo sapiens
cattcccacccttccttctttaataagcaggagcgaaaaagacaaattccaaagaggattgttcagttcaagggaatgaagaattcagaataattttggtaaatggattccaatatcgggaataagaataagctgaacagttgacctgctttgaagaaacatactgtccatttgtctaaaataatctataacaaccaaaccaatcaaaatgaattcaacattattttcccaggttgaaaatcattcagtccactctaatttctcagagaagaatgcccagcttctggcttttgaaaatgatgattgtcatctgcccttggccatgatatttaccttagctcttgcttatggagctgtgatcattcttggtgtctctggaaacctggccttgatcataatcatcttgaaacaaaaggagatgagaaatgttaccaacatcctgattgtgaacctttccttctcagacttgcttgttgccatcatgtgtctcccctttacatttgtctacacattaatggaccactgggtctttggtgaggcgatgtgtaagttgaatccttttgtgcaatgtgtttcaatcactgtgtccattttctctctggttctcattgctgtggaacgacatcagctgataatcaaccctcgagggtggagaccaaataatagacatgcttatgtaggtattgctgtgatttgggtccttgctgtggcttcttctttgcctttcctgatctaccaagtaatgactgatgagccgttccaaaatgtaacacttgatgcgtacaaagacaaatacgtgtgctttgatcaatttccatcggactctcataggttgtcttataccactctcctcttggtgctgcagtattttggtccactttgttttatatttatttgctacttcaagatatatatacgcctaaaaaggagaaacaacatgatggacaagatgagagacaataagtacaggtccagtgaaaccaaaagaatcaatatcatgctgctctccattgtggtagcatttgcagtctgctggctccctcttaccatctttaacactgtgtttgattggaatcatcagatcattgctacctgcaaccacaatctgttattcctgctctgccacctcacagcaatgatatccacttgtgtcaaccccatattttatgggttcctgaacaaaaacttccagagagacttgcagttcttcttcaacttttgtgatttccggtctcgggatgatgattatgaaacaatagccatgtccacgatgcacacagatgtttccaaaacttctttgaagcaagcaagcccagtcgcatttaaaaaaatcaacaacaatgatgataatgaaaaaatctgaaactacttatagcctatggtcccggatgacatctgtttaaaaacaagcacaacctgcaacatactttgattacctgttctcccaaggaatggggttgaaatcatttgaaaatgactaagattttcttgtcttgctttttactgcttttgttgtagttgtcataattacatttggaacaaaaggtgtgggctttggggtcttctggaaatagttttgaccagacatctttgaagtgctttttgtgaatttatgcatataatataaagacttttatactgtacttattggaatgaaatttctttaaagtattacgatgcgctgacttcagaagtacctgccatccaatacggtcattagattgggtcatcttgattagattagattagattagattgtcaacagattgggccatccttactttatgataggcatcattttagtgtgttacaatagtaacagtatgcaaaagcagcattcaggagccgaaagatagtcttgaagtcattcagaagtggtttgaggtttctgttttttggtggtttttgtttgttttttttttttttcaccttaagggaggctttcatttcctcccgactgattgtcacttaaatcaaaatttaaaaatgaataaaaagacatacttctcagctgcaaatattatggagaattgggcacccacaggaatgaagagagaaagcagctccccaacttcaaaaccattttggtacctgacaacaagagcattttagagtaattaatttaataaagtaaattagtattgctgcaaatagctaaattatatttatttgaattgatggtcaagagattttccattttttttacagactgttcagtgtttgtcaagcttctggtctaatatgtactcgaaagactttccgcttacaatttgtagaaacacaaatatcgttttccatacagcagtgcctatatagtgactgattttaactttcaatgtccatctttcaaaggaagtaacaccaaggtacaatgttaaaggaatattcactttacctagcagggaaaaatacacaaaaactgcagatacttcatatagcccattttaacttgtataaactgtgtgacttgtggcgtcttataaataatgcactgtaaagattactgaatagttgtgtcatgttaatgtgcctaatttcatgtatcttgtaatcatgattgagcctcagaatcatttggagaaactatattttaaagaacaagacatacttcaatgtattatacagataaagtattacatgtgtttgattttaaaagggcggacattttattaaaatcaatattgtttttgctttttctgaggagtctctttcagtttcattttttctcatcccatgacttccctccgatggt

SEQ ID NO: 378 - protein, 384 aa, Homo sapiens
MNSTLFSQVENHSVHSNFSEKNAQLLAFENDDCHLPLAMIFTLALAYGAVIILGVSGNLALIIIILKQKEMRNVTNILIVNLSFSDLLVAIMCLPFTFVYTLMDHWVFGEAMCKLNPFVQCVSITVSIFSLVLIAVERHQLIINPRGWRPNNRHAYVGIAVIWVLAVASSLPFLIYQVMTDEPFQNVTLDAYKDKYVCFDQFPSDSHRLSYTTLLLVLQYFGPLCFIFICYFKIYIRLKRRNNMMDKMRDNKYRSSETKRINIMLLSIVVAFAVCWLPLTIFNTVFDWNHQIIATCNHNLLFLLCHLTAMISTCVNPIFYGFLNKNFQRDLQFFFNFCDFRSRDDDYETIAMSTMHTDVSKTSLKQASPVAFKKINNNDDNEKI

SEQ ID NO: 379 - DNA, 1146 bp, Homo sapiens
agccgagcgagcccgaggatgggagggcacccgcagctccgtctcgtcaaggcccttctccttctggggctgaaccccgtctctgcctccctccaggaccagcactgcgagagcctgtccctggccagcaacatctcagacaatggctaccgggagtgcctggccaatggcagctgggccgcccgcgtgaattactccgagtgccaggagatcctcaatgaggagaaaaaaagcaaggtgcactaccatgtcgcagtcatcatcaactacctgggccactgtatctccctggtggccctcctggtggcctttgtcctctttctgcggctcaggagcatccggtgcctgcgaaacatcatccactggaacctcatctccgccttcatcctgcgcaacgccacctggttcgtggtccagctaaccatgagccccgaggtccaccagagcaacgtgggctggtgcaggttggtgacagccgcctacaactacttccatgtgaccaacttcttctggatgttcggcgagggctgctacctgcacacagccatcgtgctcacctactccactgaccggctgcgcaaatggatgttcatctgcattggctggggtgtgcccttccccatcattgtggcctgggccattgggaagctgtactacgacaatgagaagtgctggtttggcaaaaggcctggggtgtacaccgactacatctaccagggccccatgatcctggtcctgctgatcaatttcatcttccttttcaacatcgtccgcatcctcatgaccaagctccgggcatccaccacgtctgagaccattcagtacaggaaggctgtgaaagccactctggtgctgctgcccctcctgggcatcacctacatgctgttcttcgtcaatcccggggaggatgaggtctcccgggtcgtcttcatctacttcaactccttcctggaatccttccagggcttctttgtgtctgtgttctactgtttcctcaatagtgaggtccgttctgccatccggaagaggtggcaccggtggcaggacaagcactcgatccgtgcccgagtggcccgtgccatgtccatccccacctccccaacccgtgtcagctttcacagcatcaagcagtccacagcagtctga

SEQ ID NO: 380 - protein, 375 aa, Homo sapiens
MGGHPQLRLVKALLLLGLNPVSASLQDQHCESLSLASNISDNGYRECLANGSWAARVNYSECQEILNEEKKSKVHYHVAVIINYLGHCISLVALLVAFVLFLRLRSIRCLRNIIHWNLISAFILRNATWFVVQLTMSPEVHQSNVGWCRLVTAAYNYFHVTNFFWMFGEGCYLHTAIVLTYSTDRLRKWMFICIGWGVPFPIIVAWAIGKLYYDNEKCWFGKRPGVYTDYIYQGPMILVLLINFIFLFNIVRILMTKLRASTTSETIQYRKAVKATLVLLPLLGITYMLFFVNPGEDEVSRVVFIYFNSFLESFQGFFVSVFYCFLNSEVRSAIRKRWHRWQDKHSIRARVARAMSIPTSPTRVSFHSIKQSTAV

SEQ ID NO: 381 - DNA, 1983 bp, Homo sapiens
cgagtaaagtttgcaaagaggcgcgggaggcggcagccgcagcgaggaggcggcggggaagaagcgcagtctccgggttgggggcgggggcggggggggcgccaaggagccgggtggggggcggcggccagcatgcggccccgcagcgccctgccccgcctgctgctgccgctgctgctgctgcccgccgccgggccggcccagttccacggggagaagggcatctccatcccggaccacggcttctgccagcccatctccatcccgctgtgcacggacatcgcctacaaccagaccatcatgcccaaccttctgggccacacgaaccaggaggacgcaggcctagaggtgcaccagttctatccgctggtgaaggtgcagtgctcgcccgaactgcgcttcttcctgtgctccatgtacgcacccgtgtgcaccgtgctggaacaggccatcccgccgtgccgctctatctgtgagcgcgcgcgccagggctgcgaagccctcatgaacaagttcggttttcagtggcccgagcgcctgcgctgcgagcacttcccgcgccacggcgccgagcagatctgcgtcggccagaaccactccgaggacggagctcccgcgctactcaccaccgcgccgccgccgggactgcagccgggtgccgggggcaccccgggtggcccgggcggcggcggcgctcccccgcgctacgccacgctggagcaccccttccactgcccgcgcgtcctcaaggtgccatcctatctcagctacaagtttctgggcgagcgtgattgtgctgcgccctgcgaacctgcgcggcccgatggttccatgttcttctcacaggaggagacgcgtttcgcgcgcctctggatcctcacctggtcggtgctgtgctgcgcttccaccttcttcactgtcaccacgtacttggtagacatgcagcgcttccgctacccagagcggcctatcatttttctgtcgggctgctacaccatggtgtcggtggcctacatcgcgggcttcgtgctccaggagcgcgtggtgtgcaacgagcgcttctccgaggacggttaccgcacggtggtgcagggcaccaagaaggagggctgcaccatcctcttcatgatgctctacttcttcagcatggccagctccatctggtgggtcatcctgtcgctcacctggttcctggcagccggcatgaagtggggccacgaggccatcgaggccaactctcagtacttccacctggccgcctgggccgtgccggccgtcaagaccatcaccatcctggccatgggccagatcgacggcgacctgctgagcggcgtgtgcttcgtaggcctcaacagcctggacccgctgcggggcttcgtgctagcgccgctcttcgtgtacctgttcatcggcacgtccttcctcctggccggcttcgtgtcgctcttccgcatccgcaccatcatgaagcacgacggcaccaagaccgaaaagctggagcggctcatggtgcgcatcggcgtcttctccgtgctctacacagtgcccgccaccatcgtcatcgcttgctacttctacgagcaggccttccgcgagcactgggagcgctcgtgggtgagccagcactgcaagagcctggccatcccgtgcccggcgcactacacgccgcgcatgtcgcccgacttcacggtctacatgatcaaatacctcatgacgctcatcgtgggcatcacgtcgggcttctggatctggtcgggcaagacgctgcactcgtggaggaagttctacactcgcctcaccaacagccgacacggtgagaccaccgtgtgagggacgcccccaggccggaaccgcgcggcgctttcctccgcccggggtggggcccctacagactccgtattttatttttttaaataaaaaacgatcgaaaccatttcacttttaggttgctttttaaaagagaactctctgcccaacaccccc

SEQ ID NO: 382 - protein, 565 aa, Homo sapiens
MRPRSALPRLLLPLLLLPAAGPAQFHGEKGISIPDHGFCQPISIPLCTDIAYNQTIMPNLLGHTNQEDAGLEVHQFYPLVKVQCSPELRFFLCSMYAPVCTVLEQAIPPCRSICERARQGCEALMNKFGFQWPERLRCEHFPRHGAEQICVGQNHSEDGAPALLTTAPPPGLQPGAGGTPGGPGGGGAPPRYATLEHPFHCPRVLKVPSYLSYKFLGERDCAAPCEPARPDGSMFFSQEETRFARLWILTWSVLCCASTFFTVTTYLVDMQRFRYPERPIIFLSGCYTMVSVAYIAGFVLQERVVCNERFSEDGYRTVVQGTKKEGCTILFMMLYFFSMASSIWWVILSLTWFLAAGMKWGHEAIEANSQYFHLAAWAVPAVKTITILAMGQIDGDLLSGVCFVGLNSLDPLRGFVLAPLFVYLFIGTSFLLAGFVSLFRIRTIMKHDGTKTEKLERLMVRIGVFSVLYTVPATIVIACYFYEQAFREHWERSWVSQHCKSLAIPCPAHYTPRMSPDFTVYMIKYLMTLIVGITSGFWIWSGKTLHSWRKFYTRLTNSRHGETTV

SEQ ID NO: 383 - DNA, 969 bp, Homo sapiens
atggccttactgggcagccagcactccggcgccccctccgcggccggcccacctggcgggacttcctcagcggccacggcggccgtgctctccttcagcaccgtggcgaccgcggcgctggggaacctgagcgacgcaagcggaggcggcacagctgccgctcccggtggcggcggccttggcgggtccggggcagcgcgggaggcgggggcggcggtgaggcggccgctaggcccggaggcggcgccgctgctgtcgcacggagctgcagtggcggcccaggcgctcgtcctcctgctcatcttcctgctgtctagccttggcaactgcgcggtgatgggggtgattgtgaagcaccggcagctccgcaccgtcaccaacgccttcatcctgtcgctgtccctatcggatctgctcacggcgctgctctgcctgcccgccgccttcctggacctcttcactccgcccgggggttcggcgcctgcgctgcccgcggggccctggcgcggcttctgccggccaagccgcttcttcagctcgtgcttcggcatcgtgtacgctcagcgtggcgctcatctcgttggaccgttactgcgctatcgtcggccgccgcgggagaagatcggccgccgccgcgcgctgcagctgctggcgggcgcctggctgacggccctgggcttctccttgccctgggagctgctcggggcgccccgggaactcgcggcgggccagagcttccacggctgcctctaccggacctccccggaccccgcgcagctgggcggccccttcagcgtggggctggtggtggcctgctacctgctgcccttcctgctcatctgcttctgccactaccacatctgcaagacggtgcgcctgtcggacgtgcgcgtgcggccggtgaacacctacgcgcgcgtgctgcgttcttcagcgaggtgcgcacggccaccaccgtcctcatcatga

SEQ ID NO: 384 - protein, 322 aa, Homo sapiens
MALLGSQHSGAPSAAGPPGGTSSAATAAVLSFSTVATAALGNLSDASGGGTAAAPGGGGLGGSGAAREAGAAVRRPLGPEAAPLLSHGAAVAAQALVLLLIFLLSSLGNCAVMGVIVKHRQLRTVTNAFILSLSLSDLLTALLCLPAAFLDLFTPPGGSAPALPAGPWRGFCRPSRFFSSCFGIVYAQRGAHLVGPLLRYRRPPREKIGRRRALQLLAGAWLTALGFSLPWELLGAPRELAAGQSFHGCLYRTSPDPAQLGGPFSVGLVVACYLLPFLLICFCHYHICKTVRLSDVRVRPVNTYARVLRSSARCARPPPSSS

SEQ ID NO: 385 - DNA, 2856 bp, Homo sapiens
cattcagagacagaaggtggatagacaaatctccaccttcagactggtaggctcctccagaagccatcagacaggaagatgtgaaaatccccagcactcatcccagaatcactaagtggcacctgtcctgggccaaagtcccaggacagacctcattgttcctctgtgggaatacctccccaggagggcatcctggatttcccccttgcaacccaggtcagaagtttcatcgtcaaggttgtttcatcttttttttcctgtctaacagctctgactaccacccaaccttgaggcacagtgaagacatcggtggccactccaataacagcaggtcacagctgctcttctggaggtgtcctacaggtgaaaagcccagcgacccagtcaggatttaagtttacctcaaaaatggaagattttaacatggagagtgacagctttgaagatttctggaaaggtgaagatcttagtaattacagttacagctctaccctgcccccttttctactagatgccgccccatgtgaaccagaatccctggaaatcaacaagtattttgtggtcattatctatgccctggtattcctgctgagcctgctgggaaactccctcgtgatgctggtcatcttatacagcagggtcggccgctccgtcactgatgtctacctgctgaacctagccttggccgacctactctttgccctgaccttgcccatctgggccgcctccaaggtgaatggctggatttttggcacattcctgtgcaaggtggtctcactcctgaaggaagtcaacttctatagtggcatcctgctactggcctgcatcagtgtggaccgttacctggccattgtccatgccacacgcacactgacccagaagcgctacttggtcaaattcatatgtctcagcatctggggtctgtccttgctcctggccctgcctgtcttacttttccgaaggaccgtctactcatccaatgttagcccagcctgctatgaggacatgggcaacaatacagcaaactggcggatgctgttacggatcctgccccagtcctttggcttcatcgtgccactgctgatcatgctgttctgctacggattcaccctgcgtacgctgtttaaggcccacatggggcagaagcaccgggccatgcgggtcatctttgctgtcgtcctcatcttcctgctctgctggctgccctacaacctggtcctgctggcagacaccctcatgaggacccaggtgatccaggagacctgtgagcgccgcaatcacatcgaccgggctctggatgccaccgagattctgggcatccttcacagctgcctcaaccccctcatctacgccttcattggccagaagtttcgccatggactcctcaagattctagctatacatggcttgatcagcaaggactccctgcccaaagacagcaggccttcctttgttggctcttcttcagggcacacttccactactctctaagacctcctgcctaagtgcagcccgtggggttcctcccttctcttcacagtcacattccaagcctcatgtccactggttcttcttggtctcagtgtcaatgcagcccccattgtggtcacaggaagtagaggaggccacgttcttactagtttcccttgcatggtttagaaagcttgccctggtgcctcaccccttgccataattactatgtcatttgctggagctctgcccatcctgcccctgagcccatggcactctatgttctaagaagtgaaaatctacactccagtgagacagctctgcatactcattaggatggctagtatcaaaagaaagaaaatcaggctggccaacggggtgaaacctgtctctactaaaaatacaaaaaaaaaaaaaaattagccgggcgtggtggtgagtgcctgtaatcacagctacttgggaggctgagatgggagaatcacttgaacccgggagcagaggttgcagtgagccgagattgtgcccctgccatccagcctgagcgacagtgagactctgtctcagtccatgaagatgtagaggagaaactggaactctcgagcgttgctgggggggattgtaaaatggtgtgaccactgcagaagacagtatggcagctttcctcaaaacttcagacatagaattaacacatgatcctgcaattccacttataggaattgacccacaagaaatgaaagcagggacttgaacccatatttgtacaccaatattcatagcagcttattcacaagacccaaaaggcagaagcaacccaaatgttcatcaatgaatgaatgaatggctaagcaaaatgtgatatgtacctaacgaagtatccttcagcctgaaagaggaatgaagtactcatacatgttacaacacggacgaaccttgaaaactttatgctaagtgaaataagccagacatcaacagataaatagtttatgattccacctacatgaggtactgagagtgaacaaatttacagagacagaaagcagaacagtgattaccagggactgaggggaggggagcatgggaagtgacggtttaatgggcacagggtttatgtttaggatgttgaaaaagttctgcagataaacagtagtgatagttgtaccgcaatgtgacttaatgccactaaattgacacttaaaaatggtttaaatggtcaattttgttatgtatattttatatcaatttaaaaaaaaacctgagccccaaaaggtattttaatcaccaaggctgattaaaccaaggctagaaccacctgcctatattttttgttaaatgatttcattcaatatcttttttttaataaaccatttttacttgggtgtttat

SEQ ID NO: 386 - protein, 360 aa, Homo sapiens
MEDFNMESDSFEDFWKGEDLSNYSYSSTLPPFLLDAAPCEPESLEINKYFVVIIYALVFLLSLLGNSLVMLVILYSRVGRSVTDVYLLNLALADLLFALTLPIWAASKVNGWIFGTFLCKVVSLLKEVNFYSGILLLACISVDRYLAIVHATRTLTQKRYLVKFICLSIWGLSLLLALPVLLFRRTVYSSNVSPACYEDMGNNTANWRMLLRILPQSFGFIVPLLIMLFCYGFTLRTLFKAHMGQKHRAMRVIFAVVLIFLLCWLPYNLVLLADTLMRTQVIQETCERRNHIDRALDATEILGILHSCLNPLIYAFIGQKFRHGLLKILAIHGLISKDSLPKDSRPSFVGSSSGHTSTTL

SEQ ID NO: 387 - DNA, 3331 bp, Homo sapiens
cagaattccaggacaaagagatcttcaaaaatcaaaaatgaggttcacatttacaagccggtgcttggcactgtttcttcttctaaatcacccaaccccaattcttcctgccttttcaaatcaaacctatccaacaatagagcccaagccatttctttacgtcgtaggacgaaagaagatgatggatgcacagtacaaatgctatgaccgaatgcagcagttacccgcataccaaggagaaggtccatattgcaatcgcacctgggatggatggctgtgctgggatgacacaccggctggagtattgtcctatcagttctgcccagattattttccggattttgatccatcagaaaaggttacaaaatactgtgatgaaaaaggtgtttggtttaaacatcctgaaaacaatcgaacctggtccaactatactatgtgcaatgctttcactcctgagaaactgaagaatgcatatgttctgtactatttggctattgtgggtcattctttgtcaattttcaccctagtgatttccctggggattttcgtgtttttcaggagccttggctgccaaagggtaaccctgcacaagaacatgtttcttacttacattctgaattctatgattatcatcatccacctggttgaagtagtacccaatggagagctcgtgcgaagggacccggtgagctgcaagattttgcattttttccaccagtacatgatggcctgcaactatttctggatgctctgtgaagggatctatcttcatacactcattgtcgtggctgtgtttactgagaagcaacgcttgcggtggtattatctcttgggctgggggttcccgctggtgccaaccactatccatgctattaccagggccgtgtacttcaatgacaactgctggctgagtgtggaaacccatttgctttacataatccatggacctgtcatggcggcacttgtggtcaatttcttctttttgctcaacattgtccgggtgcttgtgaccaaaatgagggaaacccatgaggcggaatcccacatgtacctgaaggctgtgaaggccaccatgatccttgtgcccctgctgggaatccagtttgtcgtctttccctggagaccttccaacaagatgcttgggaagatatatgattacgtgatgcactctctgattcatttccagggcttctttgttgcgaccatctactgcttctgcaacaatgaggtccaaaccaccgtgaagcgccaatgggcccaattcaaaattcagtggaaccagcgttgggggaggcgcccctccaaccgctctgctcgcgctgcagccgctgctgcggaggctggcgacatcccaatttacatctgccatcaggagctgaggaatgaaccagccaacaaccaaggcgaggagagtgctgagatcatccctttgaatatcatagagcaagagtcatctgcttgaatgtgaaggcaaacacagcatcgtgatcactgagccatcatttcctgggagaaagaccatgcatttaaagtattctccatcctcccaggaaccgaacatatcatttgtgaagaattattcagtgaatttgtccattgtaaatctgaagaaagttattcttggtactgttgctttgggagacagtctaggaatggagtctcccactgcaacttgtgaactccatcattcatccaggactgagatgcaaatgtcacagtaatgcaagcaaagtatcaaagaaaaacaatgaaattgacctagttcagatacagggtgctccttgtcaatactgagccatttatacctttgaaatattaaaatcactgtcaatatttttatttttaactctggattttgaattagattatttctgtatttggctatggatctgatttttaatttttttaaatttcagtcaattctgatgttactgagatgttttaccatccttacaatgtaaaccacatgaactacgtgacctctgcaagacaaagcggctttctaatagagagattagtaaatatgtgaagaaaaagacctgcatttggcaggaagatgtatgctttgaatgcaaaagaaatttagagtcaatttgctgaaaacattacatgctcagcttggttttggacaagcctgtccattgggcaggacctagctgttgtaaagaattggtcttaatgttgaatgtattttggttgctgatgtttataaactgagaggtcacaaagaatctatcactaaaaatttttacaaaactgccaaaaatataattcttagtggaagacaatactccctttaaagagagtttgccactcccctaaactccaggatttataaagcaaattactccaaggtttataaagcagattacctcttgcccttgggtgctatctagcagtaaaagataaatttgttgaatattggtaattaaaagactccacataagtccattaactgctttccacccagcttcaaagcttaaaaagagctcaggcttttccaggaagatccaggagggctaattagaaatcaacttgtggttgaccgcttgtttcttgttattaccaaacaggaggggaaaaaattaactgctccaaatttaaccataaatcaattcatgtttaacgtttctcattaaaatccagtattatattatcatatctctctttacttcccagtataagatttttgaaaatcctgaataaaccagtatcgttactggcacctgaaattaatttgtgaatttgcaacagtaatcagagttaccattatttaatttgtatgctaaatgaggaggtacattgaaaccctccaaatctccagtctcatctatgtcatattttgccactgcctttcagaagtgatttagttgtggaaagataataaattgatttgttatggttacatatttagcgcacccagagaaaattaattatatttctacagagaaaatgaatttgggatactaaagtagtttaagtctcctttactgaatgtaagggggggatcgaaaagaaggtatttttccaatcacagtgttatgtagtattgttctatttttgtttacaaacatggaaaacagagtatttctggcagctgtggtacaaatgtgataatatattgctaaaatattttagatgttattatgctaatatagtaggggttgaagaaaacaaaatagcttattatagaattgcacatagttctgcccaaattatgtgaaatgcttatgcttgtgtatatgtataaattaatacagagtacgttaaaagcaaaaagatgtatatttgcatatttttctaaagaaatatattattcatcttttcattc

SEQ ID NO: 388 - protein, 474 aa, Homo sapiens
MRFTFTSRCLALFLLLNHPTPILPAFSNQTYPTIEPKPFLYVVGRKKMMDAQYKCYDRMQQLPAYQGEGPYCNRTWDGWLCWDDTPAGVLSYQFCPDYFPDFDPSEKVTKYCDEKGVWFKHPENNRTWSNYTMCNAFTPEKLKNAYVLYYLAIVGHSLSIFTLVISLGIFVFFRSLGCQRVTLHKNMFLTYILNSMIIIIHLVEVVPNGELVRRDPVSCKILHFFHQYMMACNYFWMLCEGIYLHTLIVVAVFTEKQRLRWYYLLGWGFPLVPTTIHAITRAVYFNDNCWLSVETHLLYIIHGPVMAALVVNFFFLLNIVRVLVTKMRETHEAESHMYLKAVKATMILVPLLGIQFVVFPWRPSNKMLGKIYDYVMHSLIHFQGFFVATIYCFCNNEVQTTVKRQWAQFKIQWNQRWGRRPSNRSARAAAAAAEAGDIPIYICHQELRNEPANNQGEESAEIIPLNIIEQESSA

SEQ ID NO: 389 - DNA, 3758 bp, Homo sapiens
caaacgttcccaaatcttcccagtcggcttgcagagactccttgctcccaggagataaccagaagctgcatcttattgacagatggtcatcacattggtgagctggagtcatcagattgtggggcccggagtgaggctgaagggagtggatcagagcactgcctgagagtcacctctactttcctgctaccgctgcctgtgagctgaaggggctgaaccatacactcctttttctacaaccagcttgcattttttctgcccacaatgagcggggaatcaatgaatttcagcgatgttttcgactccagtgaagattattttgtgtcagtcaatacttcatattactcagttgattctgagatgttactgtgctccttgcaggaggtcaggcagttctccaggctatttgtaccgattgcctactccttgatctgtgtctttggcctcctggggaatattctggtggtgatcacctttgctttttataagaaggccaggtctatgacagacgtctatctcttgaacatggccattgcagacatcctctttgttcttactctcccattctgggcagtgagtcatgccactggtgcgtgggttttcagcaatgccacgtgcaagttgctaaaaggcatctatgccatcaactttaactgcgggatgctgctcctgacttgcattagcatggaccggtacatcgccattgtacaggcgactaagtcattccggctccgatccagaacactaccgcgcacgaaaatcatctgccttgttgtgtgggggctgtcagtcatcatctccagctcaacttttgtcttcaaccaaaaatacaacacccaaggcagcgatgtctgtgaacccaagtaccagactgtctcggagcccatcaggtggaagctgctgatgttggggcttgagctactctttggtttctttatccctttgatgttcatgatattttgttacacgttcattgtcaaaaccttggtgcaagctcagaattctaaaaggcacaaagccatccgtgtaatcatagctgtggtgcttgtgtttctggcttgtcagattcctcataacatggtcctgcttgtgacggctgcaaatttgggtaaaatgaaccgatcctgccagagcgaaaagctaattggctatacgaaaactgtcacagaagtcctggctttcctgcactgctgcctgaaccctgtgctctacgcttttattgggcagaagttcagaaactactttctgaagatcttgaaggacctgtggtgtgtgagaaggaagtacaagtcctcaggcttctcctgtgccgggaggtactcagaaaacatttctcggcagaccagtgagaccgcagataacgacaatgcgtcgtccttcactatgtgatagaaagctgagtctccctaaggcatgtgtgaaacatactcatagatgttatgcaaaaaaaagtctatggccaggtatgcatggaaaatgtgggaattaagcaaaatcaagcaagcctctctcctgcgggacttaacgtgctcatgggctgtgtgatctcttcagggtggggtggtctctgataggtagcattttccagcactttgcaaggaatgttttgtagctctagggtatatatccgcctggcatttcacaaaacagcctttgggaaatgctgaattaaagtgaattgttgacaaatgtaaacattttcagaaatattcatgaagcggtcacagatcacagtgtcttttggttacagcacaaaatgatggcagtggtttgaaaaactaaaacagaaaaaaaaatggaagccaacacatcactcattttaggcaaatgtttaaacatttttatctatcagaatgtttattgttgctggttataagcagcaggattggccggctagtgtttcctctcatttccctttgatacagtcaacaagcctgaccctgtaaaatggaggtggaaagacaagctcaagtgttcacaacctggaagtgcttcgggaagaaggggacaatggcagaacaggtgttggtgacaattgtcaccaattggataaagcagctcaggttgtagtgggccattaggaaactgtcggtttgctttgatttccctgggagctgttctctgtcgtgagtgtctcttgtctaaacgtccattaagctgagagtgctatgaagacaggatctagaataatcttgctcacagctgtgctctgagtgcctagcggagttccagcaaacaaaatggactcaagagagatttgattaatgaatcgtaatgaagttggggtttattgtacagtttaaaatgttagatgtttttaattttttaaataaatggaatactttttttttttttaaagaaagcaactttactgagacaatgtagaaagaagttttgttccgtttctttaatgtggttgaagagcaatgtgtggctgaagacttttgttatgaggagctgcagattagctaggggacagctggaattatgctggcttctgataattattttaaaggggtctgaaatttgtgatggaatcagattttaacagctctcttcaatgacatagaaagttcatggaactcatgtttttaaagggctatgtaaatatatgaacattagaaaaatagcaacttgtgttacaaaaatacaaacacatgttaggaaggtactgtcatgggctaggcatggtggctcacacctgtaatcccagcattttgggaagctaagatgggtggatcacttgaggtcaggagtttgagaccagcctggccaacatggcgaaacccctctctactaaaaatacaaaaatttgccaggcgtggtggcgggtgcctgtaatcccagctacttgggaggctgaggcaagagaatcgcttgaacccaggaggcagaggttgcagtgagccgagatcgtgccattgcactccagcctgggtgacagagcgagactccatctcaaaaaaaaaaaaaaaaaagactccatctcaaaaaaaaaaaaaaaaaaaaaaggaaagaactgtcatgtaaacataccgacatgtttaaacctgacaatggtgttatttgaaactttatattgttcttgtaagctttaactatatctctctttaaaatgcaaaataatgtcttaagattcaaagtctgtatttttaaagcatggctttggctttgcaaaataaaaaatgtgttttgtacatgaagtaggaatcgtatttcagcttcaaggttcagattgaggggcccactgtttggagaggatggtattcaggctttctcatgtccttcaaatctgttagcgtttgactctagaaatcaaagcaaaggagtggttacccagacacttcttttggtgtgatcaatgcgctgatgtgatctatgaagatgattcatgcttgaaaactagcacagaaacatcttgcttatttgccaaagctgggagatgagcttctctgcataatttaaatgttcagataaatgaagctgacttatttaagcaataaccttttaaacattttagctaagatgtataaaaatgtttccaaaatataccacatactttatttcttcttaaatgtagtacattaggttacatcatttttcttgctgtcttgggcatcaaaacaggtgccatggtaacctgacactctcaggagacattaagatagaaggggctgttcttcagtggttcccattgattctccccatatctttttgctctcaggctctggccgtctcttcctgagccttaactgtgt

SEQ ID NO: 390 - protein, 374 aa, Homo sapiens
MSGESMNFSDVFDSSEDYFVSVNTSYYSVDSEMLLCSLQEVRQFSRLFVPIAYSLICVFGLLGNILVVITFAFYKKARSMTDVYLLNMAIADILFVLTLPFWAVSHATGAWVFSNATCKLLKGIYAINFNCGMLLLTCISMDRYIAIVQATKSFRLRSRTLPRTKIICLVVWGLSVIISSSTFVFNQKYNTQGSDVCEPKYQTVSEPIRWKLLMLGLELLFGFFIPLMFMIFCYTFIVKTLVQAQNSKRHKAIRVIIAVVLVFLACQIPHNMVLLVTAANLGKMNRSCQSEKLIGYTKTVTEVLAFLHCCLNPVLYAFIGQKFRNYFLKILKDLWCVRRKYKSSGFSCAGRYSENISRQTSETADNDNASSFTM

SEQ ID NO: 391 - DNA, 3137 bp, Homo sapiens
atggccgctgcccgcccagcgcgggggccggagctcccgctcctggggctgctgctgctgctgctgctgggggacccgggccggggggcggcctcgagcgggaacgcgaccgggcctgggcctcggagcgcgggcgggagcgcgaggaggagcgcggcggtgactggccctccgccgccgctgagccactgcggccgggctgccccctgcgagccgctgcgctacaacgtgtgcctgggctcggtgctgccctacggggccacctccacactgctggccggagactcggactcccaggaggaagcgcacggcaagctcgtgctctggtcgggcctccggaatgccccccgctgctgggcagtgatccagcccctgctgtgtgccgtatacatgcccaagtgtgagaatgaccgggtggagctgcccagccgtaccctctgccaggccacccgaggcccctgtgccatcgtggagagggagcggggctggcctgacttcctgcgctgcactcctgaccgcttccctgaaggctgcacgaatgaggtgcagaacatcaagttcaacagttcaggccagtgcgaagtgcccttggttcggacagacaaccccaagagctggtacgaggacgtggagggctgcggcatccagtgccagaacccgctcttcacagaggctgagcaccaggacatgcacagctacatcgcggccttcggggccgtcacgggcctctgcacgctcttcaccctggccacattcgtggctgactggcggaactcgaatcgctaccctgctgttattctcttctacgtcaatgcgtgcttctttgtgggcagcattggctggctggcccagttcatggatggtgcccgccgagagatcgtctgccgtgcagatggcaccatgaggcttggggagcccacctccaatgagactctgtcctgcgtcatcatctttgtcatcgtgtactacgccctgatggctggtgtggtttggtttgtggtcctcacctatgcctggcacacttccttcaaagccctgggcaccacctaccagcctctctcgggcaagacctcctacttccacctgctcacctggtcactcccctttgtcctcactgtggcaatccttgctgtggcgcaggtggatggggactctgtgagtggcatttgttttgtgggctacaagaactaccgataccgtgcgggcttcgtgctggccccaatcggcctggtgctcatcgtgggaggctacttcctcatccgaggagtcatgactctgttctccatcaagagcaaccaccccgggctgctgagtgagaaggctgccagcaagatcaacgagaccatgctgcgcctgggcatttttggcttcctggcctttggctttgtgctcattaccttcagctgccacttctacgacttcttcaaccaggctgagtgggagcgcagcttccgggactatgtgctatgtcaggccaatgtgaccatcgggctgcccaccaagcagcccatccctgactgtgagatcaagaatcgcccgagccttctggtggagaagatcaacctgtttgccatgtttggaactggcatcgccatgagcacctgggtctggaccaaggccacgctgctcatctggaggcgtacctggtgcaggttgactgggcagagtgacgatgagccaaagcggatcaagaagagcaagatgattgccaaggccttctctaagcggcacgagctcctgcagaacccaggccaggagctgtccttcagcatgcacactgtgtcccacgacgggcccgtggcgggcttggcctttgacctcaatgagccctcagctgatgtctcctctgcctgggcccagcatgtcaccaagatggtggctcggagaggagccatactgccccaggatatttctgtcacccctgtggcaactccagtgcccccagaggaacaagccaacctgtggctggttgaggcagagatctccccagagctgcagaagcgcctgggccggaagaagaagaggaggaagaggaagaaggaggtgtgcccgctggcgccgccccctgagcttcacccccctgcccctgcccccagtaccattcctcgactgcctcagctgccccggcagaaatgcctggtggctgcaggtgcctggggagctggggactcttgccgacagggagcgtggaccctggtctccaacccattctgcccagagcccagtccccctcaggatccatttctgcccagtgcaccggcccccgtggcatgggctcatggccgccgacagggcctggggcctattcactcccgcaccaacctgatggacacagaactcatggatgcagactcggacttctgagcctgcagagcaggacctgggacaggaaagagaggaaccaataccttcaaggctcttcttcctcaccgagcatgcttccctaggatcccgtcttccagagaacctgtgggctgactgccctccgaagagagttctggatgtctggctcaaagcagcaggactgtgggaaagagcctaacatctccatggggaggcctcaccccagggacagggccctggagctcagggtccttgtttctgccctgccagctgcagcctggttggcagcatctgctccatcggggcagggggtatgcagagcttgtggtggggcaggaacggtggaggcagaggtgacagttcccagagtgggctttggtggccagggaggcagcctagcctatgtctggcagatgagggctggctgccgttttctgggctgatgggtgccctttcctggcagtctcagtccaaaagtgttgactgtgtcattagtcctttgtctaagtagggccagggcaccgtattcctctcccaggtgtttgtggggctggaaggacctgctcccacaggggccatgtcctctcttaataggtggcactaccccaaacccatcttttgttctcctatatcctccttctcctgttccatttcagttcagtttcagcggtgccaacctctttgcgtttcctttttgttgatgaggacccagagctgctgcacacactcacctctaaccccctcccctcgctgctgggccccatctccacaggagagactggttcggctctagg

SEQ ID NO: 392 - protein, 787 aa, Homo sapiens
MAAARPARGPELPLLGLLLLLLLGDPGRGAASSGNATGPGPRSAGGSARRSAAVTGPPPPLSHCGRAAPCEPLRYNVCLGSVLPYGATSTLLAGDSDSQEEAHGKLVLWSGLRNAPRCWAVIQPLLCAVYMPKCENDRVELPSRTLCQATRGPCAIVERERGWPDFLRCTPDRFPEGCTNEVQNIKFNSSGQCEVPLVRTDNPKSWYEDVEGCGIQCQNPLFTEAEHQDMHSYIAAFGAVTGLCTLFTLATFVADWRNSNRYPAVILFYVNACFFVGSIGWLAQFMDGARREIVCRADGTMRLGEPTSNETLSCVIIFVIVYYALMAGVVWFVVLTYAWHTSFKALGTTYQPLSGKTSYFHLLTWSLPFVLTVAILAVAQVDGDSVSGICFVGYKNYRYRAGFVLAPIGLVLIVGGYFLIRGVMTLFSIKSNHPGLLSEKAASKINETMLRLGIFGFLAFGFVLITFSCHFYDFFNQAEWERSFRDYVLCQANVTIGLPTKQPIPDCEIKNRPSLLVEKINLFAMFGTGIAMSTWVWTKATLLIWRRTWCRLTGQSDDEPKRIKKSKMIAKAFSKRHELLQNPGQELSFSMHTVSHDGPVAGLAFDLNEPSADVSSAWAQHVTKMVARRGAILPQDISVTPVATPVPPEEQANLWLVEAEISPELQKRLGRKKKRRKRKKEVCPLAPPPELHPPAPAPSTIPRLPQLPRQKCLVAAGAWGAGDSCRQGAWTLVSNPFCPEPSPPQDPFLPSAPAPVAWAHGRRQGLGPIHSRTNLMDTELMDADSDF

SEQ ID NO: 393 - DNA, 1119 bp, Homo sapiens
atggcctgcaacagcacgtcccttgaggcttacacatacctgctgctgaacaccagcaacgcctcagactcggggtccacccagttgcccgcacccctcaggatctccttggccatagtgatgctgctgatgaccgtggtggggttcctgggcaacactgtggtctgcatcatcgtgtaccagaggccggctatgcgctcggccatcaacctgctgctggccaccctggccttctccgacatcatgctgtccctctgctgcatgcccttcaccgccgtcaccctcatcaccgtgcgctggcactttggggaccacttctgccgcctctcagccacgctctactggttttttgtcctggagggcgtggccatcctgctcatcatcagcgtggaccgcttcctcatcatcgtccagcgccaggacaagctgaacccgcgcagggccaaggtgatcatcgcggtctcctgggtgctgtccttctgcatcgcggggccctcgctcacgggctggacgctggtggaggtgccggcgcgggccccacagtgcgtgctgggctacacggagctccccgctgaccgcgcatacgtggtcaccttggtggtggccgtgttcttcgcgccctttggcgtcatgctgtgcgcctacatgtgcatcctcaacacggtccgcaagaacgccgtgcgcgtgcacaaccagtcggacagcctggacctgcggcagctcaccagggcgggcctgcggcgcctgcagcggcagcaacaggtcagcgtggacttgagcttcaagaccaaggccttcaccaccatcctgatcctcttcgtgggcttctccctctgctggctgccccactccgtctacagcctcctgtctgtgtttagccagcgcttttactgcggttcctccttctacgccaccagcacctgcgtcctgtggttcagttacctcaagtccgtcttcaaccccatcgtctactgctggagaatcaaaaaattccgcgaggcctgcatagagttgctgccccagaccttccaaatcctccccaaagtgcctgagcggatccgaaggagaatccagccaagcacagtatacgtgtgcaatgaaaaccagtctgcggtttag

SEQ ID NO: 394 - protein, 372 aa, Homo sapiens
MACNSTSLEAYTYLLLNTSNASDSGSTQLPAPLRISLAIVMLLMTVVGFLGNTVVCIIVYQRPAMRSAINLLLATLAFSDIMLSLCCMPFTAVTLITVRWHFGDHFCRLSATLYWFFVLEGVAILLIISVDRFLIIVQRQDKLNPRRAKVIIAVSWVLSFCIAGPSLTGWTLVEVPARAPQCVLGYTELPADRAYVVTLVVAVFFAPFGVMLCAYMCILNTVRKNAVRVHNQSDSLDLRQLTRAGLRRLQRQQQVSVDLSFKTKAFTTILILFVGFSLCWLPHSVYSLLSVFSQRFYCGSSFYATSTCVLWFSYLKSVFNPIVYCWRIKKFREACIELLPQTFQILPKVPERIRRRIQPSTVYVCNENQSAV

SEQ ID NO: 395 - DNA, 1371 bp, Homo sapiens
ggtcttatgagctgctattgaacacggcagagcctgttggtgacctgcacacaggagccctccagtcagtactgattgaattactcaaggctgcctctctgcaaagttgagcactacaggacgtcgggactgggcatttccttccaacatggccgccactgcctctccgcagccactcgccactgaggatgccgattctgagaatagcagcttctattactatgactacctggatgaagtggccttcatgctctgcaggaaggatgcagtggtgtcctttggcaaagtcttcctcccagtcttctatagcctgatttttgtgttgggcctcagcgggaacctccttcttctcatggtcttgctccgttacgtgcctcgcaggcggatggttgagatctatctgctgaatctggccatctccaaccttctgtttctggtgacactgcccttctggggcatctccgtggcctggcattgggtcttcgggagtttcttgtgcaagatggtgagcactctttatactattaacttttacagtggcatctttttcattagctgcatgagcctggacaagtacctggagatcgttcatgctcagccctaccacaggctgaggacccgggccaagagcctgctccttgctaccatagtatgggctgtgtccctggccgtctccatccctgatatggtctttgtacagacacatgaaaatcccaagggtgtgtggaactgccacgcagatttcggcgggcatgggaccatttggaagctcttcctccgcttccagcagaacctcctagggtttctccttccactccttgccatgatcttcttctactcccgtattggttgtgtcttggtgaggctgaggcccgcaggccagggccgggctttaaaaatagctgcagccttggtggtggccttcttcgtgctatggttcccatacaatctcaccttgtttctgcatacgctgttggacctgcaagtattcgggaactgtgaggtcagccagcatctagactacgcactccaggtaacagagagcatcgccttccttcactgctgcttttcccccatcctgtatgccttctccagtcaccgcttccgccagtacctgaaggctttcctggctgccgtgcttggatggcacctggcacctggcactgcccaggcctcattatccagctgttctgagagcagcatacttactgcccaagaggaaatgactggcatgaatgaccttggagagaggcagtctgagaactaccctaacaaggaggatgtggggaataaatcagcctgagtgaccaaattttggtctggtgggaacagatgggaaccagctcaattgggtgtccactcaaagtgctc

SEQ ID NO: 396 - protein, 384 aa, Homo sapiens
MAATASPQPLATEDADSENSSFYYYDYLDEVAFMLCRKDAVVSFGKVFLPVFYSLIFVLGLSGNLLLLMVLLRYVPRRRMVEIYLLNLAISNLLFLVTLPFWGISVAWHWVFGSFLCKMVSTLYTINFYSGIFFISCMSLDKYLEIVHAQPYHRLRTRAKSLLLATIVWAVSLAVSIPDMVFVQTHENPKGVWNCHADFGGHGTIWKLFLRFQQNLLGFLLPLLAMIFFYSRIGCVLVRLRPAGQGRALKIAAALVVAFFVLWFPYNLTLFLHTLLDLQVFGNCEVSQHLDYALQVTESIAFLHCCFSPILYAFSSHRFRQYLKAFLAAVLGWHLAPGTAQASLSSCSESSILTAQEEMTGMNDLGERQSENYPNKEDVGNKSA

SEQ ID NO: 397 - DNA, 4445 bp, Homo sapiens
cgctccccgctcccgtggctgccgccgccccggggaagaagagacaggggtggggtttgggggaagcgagagaggaggggagagaccctggccaggctggagcctggattcgaggggaggagggacgggaggaggagaaaggtggaggagaagggaggggggagcggggaggagcggccgggcctggggccttgaggcccggggagagccggggagccgggcccgcgcgccgagatgttgctgctgctgttactggcgccactcttcctccgccccccgggcgcgggcggggcgcagacccccaacgccacctcagaaggttgccagatcatacacccgccctgggaagggggcatcaggtaccggggcctgactcgggaccaggtgaaggctatcaacttcctgccagtggactatgagattgagtatgtgtgccggggggagcgcgaggtggtggggcccaaggtccgcaagtgcctggccaacggctcctggacagatatggacacacccagccgctgtgtccgaatctgctccaagtcttatttgaccctggaaaatgggaaggttttcctgacgggtggggacctcccagctctggacggagcccgggtggatttccggtgtgaccccgacttccatctggtgggcagctcccggagcatctgtagtcagggccagtggagcacccccaagccccactgccaggtgaatcgaacgccacactcagaacggcgcgcagtgtacatcggggcactgtttcccatgagcgggggctggccagggggccaggcctgccagcccgcggtggagatggcgctggaggacgtgaatagccgcagggacatcctgccggactatgagctcaagctcatccaccacgacagcaagtgtgatccaggccaagccaccaagtacctatatgagctgctctacaacgaccctatcaagatcatccttatgcctggctgcagctctgtctccacgctggtggctgaggctgctaggatgtggaacctcattgtgctttcctatggctccagctcaccagccctgtcaaaccggcagcgtttccccactttcttccgaacgcacccatcagccacactccacaaccctacccgcgtgaaactctttgaaaagtggggctggaagaagattgctaccatccagcagaccactgaggtcttcacttcgactctggacgacctggaggaacgagtgaaggaggctggaattgagattactttccgccagagtttcttctcagatccagctgtgcccgtcaaaaacctgaagcgccaggatgcccgaatcatcgtgggacttttctatgagactgaagcccggaaagttttttgtgaggtgtacaaggagcgtctctttgggaagaagtacgtctggttcctcattgggtggtatgctgacaattggttcaagatctacgacccttctatcaactgcacagtggatgagatgactgaggcggtggagggccacatcacaactgagattgtcatgctgaatcctgccaatacccgcagcatttccaacatgacatcccaggaatttgtggagaaactaaccaagcgactgaaaagacaccctgaggagacaggaggcttccaggaggcaccgctggcctatgatgccatctgggccttggcactggccctgaacaagacatctggaggaggcggccgttctggtgtgcgcctggaggacttcaactacaacaaccagaccattaccgaccaaatctaccgggcaatgaactcttcgtcctttgagggtgtctctggccatgtggtgtttgatgccagcggctctcggatggcatggacgcttatcgagcagcttcagggtggcagctacaagaagattggctactatgacagcaccaaggatgatctttcctggtccaaaacagataaatggattggagggtcccccccagctgaccagaccctggtcatcaagacattccgcttcctgtcacagaaactctttatctccgtctcagttctctccagcctgggcattgtcctagctgttgtctgtctgtcctttaacatctacaactcacatgtccgttatatccagaactcacagcccaacctgaacaacctgactgctgtgggctgctcactggctttagctgctgtcttccccctggggctcgatggttaccacattgggaggaaccagtttcctttcgtctgccaggcccgcctctggctcctgggcctgggctttagtctgggctacggttccatgttcaccaagatttggtgggtccacacggtcttcacaaagaaggaagaaaagaaggagtggaggaagactctggaaccctggaagctgtatgccacagtgggcctgctggtgggcatggatgtcctcactctcgccatctggcagatcgtggaccctctgcaccggaccattgagacatttgccaaggaggaacctaaggaagatattgacgtctctattctgccccagctggagcattgcagctccaggaagatgaatacatggcttggcattttctatggttacaaggggctgctgctgctgctgggaatcttccttgcttatgagaccaagagtgtgtccactgagaagatcaatgatcaccgggctgtgggcatggctatctacaatgtggcagtcctgtgcctcatcactgctcctgtcaccatgattctgtccagccagcaggatgcagcctttgcctttgcctctcttgccatagttttctcctcctatatcactcttgttgtgctctttgtgcccaagatgcgcaggctgatcacccgaggggaatggcagtcggaggcgcaggacaccatgaagacagggtcatcgaccaacaacaacgaggaggagaagtcccggctgttggagaaggagaaccgtgaactggaaaagatcattgctgagaaagaggagcgtgtctctgaactgcgccatcaactccagtctcggcagcagctccgctcccggcgccacccaccgacacccccagaaccctctgggggcctgcccaggggaccccctgagccccccgaccggcttagctgtgatgggagtcgagtgcatttgctttataagtgagggtagggtgagggaggacaggccagtagggggagggaaagggagaggggaagggcaggggactcaggaagcagggggtccccatccccagctgggaagaacatgctatccaatctcatctcttgtaaatacatgtccccctgtgagttctgggctgatttgggtctctcatacctctgggaaacagacctttttctctcttactgcttcatgtaattttgtatcacctcttcacaatttagttcgtacctggcttgaagctgctcactgctcacacgctgcctcctcagcagcctcactgcatctttctcttcccatgcaacaccctcttctagttaccacggcaacccctgcagctcctctgcctttgtgctctgttcctgtccagcaggggtctcccaacaagtgctctttccaccccaaaggggcctctccttttctccactgtcataatctctttccatcttacttgcccttctatactttctcacatgtggctccccctgaattttgcttcctttgggagctcattcttttcgccaaggctcacatgctccttgcctctgctctgtgcactcacgctcagcacacatgcatcctcccctctcctgcgtgtgcccactgaacatgctcatgtgtacacacgcttttcccgtatgctttcttcatgttcagtcacatgtgctctcgggtgccctgcattcacagctacgtgtgcccctctcatggtcatgggtctgcccttgagcgtgtttgggtaggcatgtgcaatttgtctagcatgctgagtcatgtctttcctatttgcacacgtccatgtttatccatgtactttccctgtgtaccctccatgtaccttgtgtactttcttcccttaaatcatggtattcttctgacagagccatatgtaccctaccctgcacattgttatgcacttttccccaattcatgtttggtggggccatccacaccctctccttgtcacagaatctccatttctgctcagattccccccatctccattgcattcatgtactaccctcagtctacactcacaatcatcttctcccaagactgctcccttttgttttgtgtttttttgaggggaattaaggaaaaataagtgggggcaggtttggagagctgcttccagtggatagttgatgagaatcctgaccaaaggaaggcacccttgactgttgggatagacagatggacctatggggtgggaggtggtgtccctttcacactgtggtgtctcttggggaaggatctccccgaatctcaataaaccagtgaacagtgtgactcggcaaaaaaaaaaa

SEQ ID NO: 398 - protein, 961 aa, Homo sapiens
MLLLLLLAPLFLRPPGAGGAQTPNATSEGCQIIHPPWEGGIRYRGLTRDQVKAINFLPVDYEIEYVCRGEREVVGPKVRKCLANGSWTDMDTPSRCVRICSKSYLTLENGKVFLTGGDLPALDGARVDFRCDPDFHLVGSSRSICSQGQWSTPKPHCQVNRTPHSERRAVYIGALFPMSGGWPGGQACQPAVEMALEDVNSRRDILPDYELKLIHHDSKCDPGQATKYLYELLYNDPIKIILMPGCSSVSTLVAEAARMWNLIVLSYGSSSPALSNRQRFPTFFRTHPSATLHNPTRVKLFEKWGWKKIATIQQTTEVFTSTLDDLEERVKEAGIEITFRQSFFSDPAVPVKNLKRQDARIIVGLFYETEARKVFCEVYKERLFGKKYVWFLIGWYADNWFKIYDPSINCTVDEMTEAVEGHITTEIVMLNPANTRSISNMTSQEFVEKLTKRLKRHPEETGGFQEAPLAYDAIWALALALNKTSGGGGRSGVRLEDFNYNNQTITDQIYRAMNSSSFEGVSGHVVFDASGSRMAWTLIEQLQGGSYKKIGYYDSTKDDLSWSKTDKWIGGSPPADQTLVIKTFRFLSQKLFISVSVLSSLGIVLAVVCLSFNIYNSHVRYIQNSQPNLNNLTAVGCSLALAAVFPLGLDGYHIGRNQFPFVCQARLWLLGLGFSLGYGSMFTKIWWVHTVFTKKEEKKEWRKTLEPWKLYATVGLLVGMDVLTLAIWQIVDPLHRTIETFAKEEPKEDIDVSILPQLEHCSSRKMNTWLGIFYGYKGLLLLLGIFLAYETKSVSTEKINDHRAVGMAIYNVAVLCLITAPVTMILSSQQDAAFAFASLAIVFSSYITLVVLFVPKMRRLITRGEWQSEAQDTMKTGSSTNNNEEEKSRLLEKENRELEKIIAEKEERVSELRHQLQSRQQLRSRRHPPTPPEPSGGLPRGPPEPPDRLSCDGSRVHLLYK

SEQ ID NO: 399 - DNA, 1590 bp, Homo sapiens
gaattccgggtttgtgcatccactctggaaccgctcgtgtgtggcctgtcggaatgacatcgccctcatcagtctccgcacgcgttcccgaggtggcagcgatggcccagtcctgaactccccgccatggccggcgcccccggcccgctgcgccttgcgctgctgctgctcgggatggtgggcagggccggcccccgcccccagggtgccactgtgtccctctgggagacggtgcagaaatggcgagaataccgacgccagtgccagcgctccctgactgaggatccacctcctgccacagacttgttctgcaaccggaccttcgatgaatacgcctgctggccagatggggagccaggctcgttcgtgaatgtcagctgcccctggtacctgccctgggccagcagtgtgccgcagggccacgtgtaccggttctgcacagctgaaggcctctggctgcagaaggacaactccagcctgccctggagggacttgtcggagtgcgaggagtccaagcgaggggagagaagctccccggaggagcagctcctgttcctctacatcatctacacggtgggctacgcactctccttctctgctctggttatcgcctctgcgatcctcctcggcttcagacacctgcactgcaccaggaactacatccacctgaacctgtttgcatccttcatcctgcgagcattgtccgtcttcatcaaggacgcagccctgaagtggatgtatagcacagccgcccagcagcaccagtgggatgggctcctctcctacctggactctctgagctgccgcctggtgtttctgctcatgcagtactgtgtggcggccaattactactggctcttggtggagggcgtgtacctgtacacactgctggccttctcggtcttatctgagcaatggatcttcaggctctacgtgagcataggctggggtgttcccctgctgtttgttgtcccctggggcattgtcaagtacctctatgaggacgagggctgctggaccaggaactccaacatgaactactggctcattatccggctgcccattctctttgccattggggtgaacttcctcatctttgttcgggtcatctgcatcgtggtatccaaactgaaggccaatctcatgtgcaagacagacatcaaatgcagacttgccaagtccacgctgacactcatccccctgctggggactcatgaggtcatctttgcctttgtgatggacgagcacgcccgggggaccctgcgcttcatcaagctgtttacagagctctccttcacctccttccaggggctgatggtggccatattatactgctttgtcaacaatgaggtccagctggaatttcggaagagctgggagcgctggcggcttgagcacttgcacatccagagggacagcagcatgaagcccctcaagtgtcccaccagcagcctgagcagtggagccacggcgggcagcagcatgtacacagccacttgccaggcctcctgcagctgagactccagcgcctgccctccctggggtccttgctgcagccgggtggccaatccagcctcccccacaaatacc

SEQ ID NO: 400 - protein, 463 aa, Homo sapiens
MAGAPGPLRLALLLLGMVGRAGPRPQGATVSLWETVQKWREYRRQCQRSLTEDPPPATDLFCNRTFDEYACWPDGEPGSFVNVSCPWYLPWASSVPQGHVYRFCTAEGLWLQKDNSSLPWRDLSECEESKRGERSSPEEQLLFLYIIYTVGYALSFSALVIASAILLGFRHLHCTRNYIHLNLFASFILRALSVFIKDAALKWMYSTAAQQHQWDGLLSYLDSLSCRLVFLLMQYCVAANYYWLLVEGVYLYTLLAFSVLSEQWIFRLYVSIGWGVPLLFVVPWGIVKYLYEDEGCWTRNSNMNYWLIIRLPILFAIGVNFLIFVRVICIVVSKLKANLMCKTDIKCRLAKSTLTLIPLLGTHEVIFAFVMDEHARGTLRFIKLFTELSFTSFQGLMVAILYCFVNNEVQLEFRKSWERWRLEHLHIQRDSSMKPLKCPTSSLSSGATAGSSMYTATCQASCS

SEQ ID NO: 401 - DNA, 1884 bp, Homo sapiens
gccttgcacatggagatgcttagctgagggggtggctttgttagactatttgcaggtcgtgagatagagcctgagatgggggactgggcccctgcctgggggattgggtcgtgacctgtgtggagccccacactgagctgcagtgggtggggagggtggtttacaggggtgctctgtgcagcccctctgattttcccctgggagtcccaggtccaggggaaggaggacagtggcccaggccacacagctcactgggcggctctcactcccccagggctggctgctggcgggatggacaccctggaggaggtgacttgggccaatgggagcacagcgctacccccacccctggcaccaaacatcagtgtgcctcatcgctgcctgctgctgctctacgaagacattggcacctccagggtccggtactgggacctcttgctgctcatccccaatgtgctcttcctcatcttcctgctctggaagcttccatctgctcgggcgaagatccgcatcacctccagccccatttttatcaccttctacatcctggtgtttgtggtggcgctggtgggcattgcccgggccgtggtatccatgacggtgagcacctcgaacgctgcaactgttgctgataagatcctgtgggagatcacccgcttcttcctgctggccatcgagctgagtgtgatcatcctgggcctggcctttggcacctgggagagtaagtccagcatcaagcgggtgctggccatcaccacagtgctgtccctggcctactctgtcacccaggggaccctggagatcctgtaccctgatgcccatctctcagctgaggactttaatatctatggccatgggggccgccagttctggctggtcagctcctgcttcttcttcctggtctactctctggtggtcatccttcccaagaccccgctgaaggagcgcatctccctgccttctcggaggagcttctacgtgtatgcgggcatcctggcactgctcaacctactgcaggggctggggagtgtgctgctgtgcttcgacatcatcgaggggctctgctgtgtagatgccacaaccttcctgtacttcagcttcttcgctccgctcatctacgtggctttcctccggggcttcttcggctcggagcccaagatcctcttctcctacaaatgccaagtggacgagacagaggagccagatgtacacctaccccagccctacgctgtggcccggcgggagggcctggaggctgcaggggctgctggggcctcagctgccagctactcgagcacgcagttcgactctgccggcggggtggcctacctggatgacatcgcttccatgccctgccacactggcagcatcaacagcacagacagcgagcgctggaaggccatcaatgcctgagggcagctgccagggcctgtggaggacaggccagagaggaggccagcaggcccagagtccccaggggaggaggaccaggtcaagggacgttctgtgggcagtagccctgtgtggccctgttcccaccatgagtctggaggccccacctccctggggctcccaatcccctttgccatctctgctctcactggggaccctcctccccttcccacctgctctcatactgctcagtgacatggcccaggctttccttccagggccatgcttggcaaggttggctgagggcaccctccttctctgcacccttggcacgagggcagggctggctctcccaatgcctccatcccatccccatggtgctttggcctcctcaaagcatccaccatggtggatggactgaagtgtgtatattttcttgatctattttttaataaaaaggaaaaggagcaaaaaaaaaaaaaaaaagttttg

SEQ ID NO: 402 - protein, 373 aa, Homo sapiens
MDTLEEVTWANGSTALPPPLAPNISVPHRCLLLLYEDIGTSRVRYWDLLLLIPNVLFLIFLLWKLPSARAKIRITSSPIFITFYILVFVVALVGIARAVVSMTVSTSNAATVADKILWEITRFFLLAIELSVIILGLAFGTWESKSSIKRVLAITTVLSLAYSVTQGTLEILYPDAHLSAEDFNIYGHGGRQFWLVSSCFFFLVYSLVVILPKTPLKERISLPSRRSFYVYAGILALLNLLQGLGSVLLCFDIIEGLCCVDATTFLYFSFFAPLIYVAFLRGFFGSEPKILFSYKCQVDETEEPDVHLPQPYAVARREGLEAAGAAGASAASYSSTQFDSAGGVAYLDDIASMPCHTGSINSTDSERWKAINA

SEQ ID NO: 403 - DNA, 3567 bp, Homo sapiens
agtgatgagcggcggctgcctggcagtgcagtgggctggctggtatgtgggggcctctccctgctggccaatgcctggggcatcctcagcgttggcgccaagcagaagaagtggaagcccttggagttcctgctgtgtacactcgcggccacccacatgctaaatgtggccgtgcccatcgccacctactccgtggtgcagctgcggcggcagcgccccgacttcgagtggaatgagggtctctgcaaggtcttcgtgtccaccttctacaccctcaccctggccacctgtttctctgtcacctccctctcctaccaccgcatgtggatggtctgctggcctgtcaactaccggtgagcatgtgaagttctggggttcttggggttctaagcaggcgtgaaaacaaagacatatctggtgtgcccatgcgcacacaggagtggccacacctgtggcatgctgggagggcaggcaggctcaggaggggctgctgtaagctgctgggggcatacacgtagctttgcatgggtagacacaagcagccaatacagaatgcttggaagagggacgtgtgacaatgttcacagtatctcctatgcaaggaacaaggccctgccacactggctgtgccatgactatgatatactgggggtgtggggtgcctgggtggtgcggatcccctacaggtccccagaggcctggggaggccctgtgggtgacgccagatccctctgttccaccctgcctcatgccaggctgagcaatgccaagaagcaggcggtgcacacagtcatgggtatctggatggtgtccttcatcctgtcggccctgcctgccgttggctggcacgacaccagcgagcgcttctacacccatggctgccgcttcatcgtggctgagatcggcctgggctttggcgtctgcttcctgctgctggtgggcggcagcgtggccatgggcgtgatctgcacagccatcgccctcttccagacgctggccgtgcaggtggggcgccaggccgaccgccgcgccttcaccgtgcccaccatcgtggtggaggacgcgcagggcaagcggcgctcctccatcgatggctcggagcccgccaaaacctctctgcagaccacgggcctcgtgaccaccatagtcttcatctacgactgcctcatgggcttccctgtgctggtgggtgacggcgtcgggtagaggggcctgtctctgggacagccctggggctgctcatactccaggcatcaggtggttgagtcctcagacccaatcctttgagatgggcttgatcatcgtccccattttccagatttggaaaccgaggttcagagaggtgtaaagacctgcctagagtcagggcagcctggtgggacttgaacccacatccggcaactgcagggcccagggcctagctgctacagtgcagaagagtttactccccttgcccaaggcccatttttttgtttttgttttactttatttatttatttatttttgagacagagttttgctcttgttgcccaggctggatgtgcaatggcacaatctcagctcactgcaacctctgcctcctgggttcaagcgagtctcctgcctcagcctccaagtagctgggattacaggtgcccgctgccacgcctggctaattttttttttgtatttttagtacagacaggttttcaccatgttagtcaggctggtctcgaactcctgacctcaggtgatctgcccatctcagcctcccaaactgctaggattacaagcgtgaaccactgcatctggcctcaagggccgtttgatgcagaggtaggatagcatacccatgggtttcctggtgggtccaggtcccaggatggacagagggagctttggtgccgtaggtaggtaggtaggggcgcaggatcaggagacagagcaaggccagggcgggcctcaaatgtctgttggggagttgcacttgatactaacggctggggaaggccaaggtgagggctgctgtgagaaaggccttgccgacaaaggtctgaggtccagaggggctgcctggggtcctcttggtgaagctgggaccagcttggcccaagaatgaagtctggactcagtagccaacccctgccccctgcaggactctacgcccatccccgaaaggtctgcagtgagacagggagaggactggggcaaagaccagcctgaggggtttcatccaagcagcaggcaagactgccttccctgagccattgcaggacatgaggacatgagctccagaatggtgactcggggggtggcagcttcagagtcagggccttgctcaggaggcagcccccactgccccacccccagcaggcctggttctccccagctaagggtcctcatgtgtacagtgggggctggcagcccggtccctgtgcagatggagggcaggggcttcatgaaacagcagagacccacaaggcacctcgggagcagagtgggggcagtggtggggagaggcggggctgggagggagtcagaaccacccctgcgtctcttacggacggggaagagggtacagcttgtggggccactccatgctgctgttataaagcgtccggagtcttcaccctctagagcatggcctgttcttagcccattttccagatgaagaaactgagccccaaaggggtttagcagctttctgagggtcacgtggcccacaaacggcagaatcaacatacccacatcctccacactttcactcttttgtggcagtcacttaagcatcactctttgggacagagcaacgagggctatcctgggagaggaggaatgcagggacccaaaagcaggggtagggctgaggaggccactggccgggaagggggtggtagaatcttgaacaggcttgagacctggttctctaagcctcagtttcctcatctcaaaaaggggatggcagccgggcacagtgattcatacccgtaatcccagcactttgggaggccgaggcaggaggatctcttaagcccaggagatggaggctgcagtgagccatgattgagccactgcactccagcctgggtgacagaatgagactgtctcaaaacaaagcggggaggaggtggtaatccatgccccacttctctccatgggcagccaggaggaagacagagcaaggccacccagtgctgcccagtagccaggtagctcccggaaggcggggcctcccactgccacgctccagctcttttctccccaagggccccttctccttggcagatacccacctgtcagacctgccgtacacatggggagaccgagactcagggggagcttgtgtgatggtggggggtcctgcaggtgccaggccgagccctgtgcccacaggtggtgagcttcagcagcctgcgggccgacgcctcagcgccctggatggcactctgcgtgctgtggtgctccgtggcccaggccctgctgctgcctgtgttcctctgggcctgcgaccgctaccgggctgacctcaaagctgtccgggagaagtgcatggccctcatggccaacgacgaggagtcagacgatggt

SEQ ID NO: 404 - protein, 326 aa, Homo sapiens
SDERRLPGSAVGWLVCGGLSLLANAWGILSVGAKQKKWKPLEFLLCTLAATHMLNVAVPIATYSVVQLRRQRPDFEWNEGLCKVFVSTFYTLTLATCFSVTSLSYHRMWMVCWPVNYRLSNAKKQAVHTVMGIWMVSFILSALPAVGWHDTSERFYTHGCRFIVAEIGLGFGVCFLLLVGGSVAMGVICTAIALFQTLAVQVGRQADRRAFTVPTIVVEDAQGKRRSSIDGSEPAKTSLQTTGLVTTIVFIYDCLMGFPVLVVSFSSLRADASAPWMALCVLWCSVAQALLLPVFLWACDRYRADLKAVREKCMALMANDEESDDG

SEQ ID NO: 405 - DNA, 4353 bp, Homo sapiens
gtgcaagaagaaaatagatgttatgcccatccaaattttggcaaatgaagaaatgaaggtgatgtgcgacaacaatcctgtatctttgaactgctgcagtcagggtaatgttaattggagcaaagtagaatggaagcaggaaggaaaaataaatattccaggaacccctgagacagacatagattctagctgcagcagatacaccctcaaggctgatggaacccagtgcccaagcgggtcgtctggaacaacagtcatctacacttgtgagttcatcagtgcctatggagccagaggcagtgcaaacataaaagtgacattcatctctgtggccaatctaacaataaccccggacccaatttctgtttctgagggacaaaacttttctataaaatgcatcagtgatgtgagtaactatgatgaggtttattggaacacttctgctggaattaaaatataccaaagattttataccacgaggaggtatcttgatggagcagaatcagtactgacagtcaagacctcgaccagggagtggaatggaacctatcactgcatatttagatataagaattcatacagtattgcaaccaaagacgtcattgttcacccgctgcctctaaagctgaacatcatggttgatcctttggaagctactgtttcatgcagtggttcccatcacatcaagtgctgcatagaggaggatggagactacaaagttactttccatatgggttcctcatcccttcctgctgcaaaagaagttaacaaaaaacaagtgtgctacaaacacaatttcaatgcaagctcagtttcctggtgttcaaaaactgttgatgtgtgttgtcactttaccaatgctgctaataattcagtttggagcccatctatgaagctgaatctggttcctggggaaaacatcacatgccaggatcccgtaataggtgtcggagagccggggaaagtcatccagaagctatgccggttctcaaacgttcccagcagccctgagagtcccattggcgggaccatcacttacaaatgtgtaggctcccagtgggaggagaagagaaatgactgcatctctgccccaataaacagtctgctccagatggctaaggctttgatcaagagcccctctcaggatgagatgctccctacatacctgaaggatctttctattagcatagacaaagcggaacatgaaatcagctcttctcctgggagtctgggagccattattaacatccttgatctgctctcaacagttccaacccaagtaaattcagaaatgatgacgcacgtgctctctacggttaatgtcatccttggcaagcccgtcttgaacacctggaaggttttacaacagcaatggaccaatcagagttcacagctactacattcagtggaaagattttcccaagcattacagtcaggagatagccctcctttgtccttctcccaaactaatgtgcagatgagcagcacggtaatcaagtccagccacccagaaacctatcaacagaggtttgttttcccatactttgacctctggggcaatgtggtcattgacaagagctatctagaaaacttgcagtcggattcgtctattgtcaccatggctttcccaactctccaagccatccttgctcaggatatccaggaaaataactttgcagagagcttagtgatgacaaccactgtcagccacaatacgactatgccattcaggatttcaatgacttttaagaacaatagcccttcaggcggcgaaacgaagtgtgtcttctggaacttcaggcttgccaacaacacaggggggtgggacagcagtgggtgctatgttgaagaaggtgatggggacaatgtcacctgtatctgtgaccacctaacatcattctccatcctcatgtcccctgactccccagatcctagttctctcctgggaatactcctggatattatttcttatgttggggtgggcttttccatcttgagcttggcagcctgtctagttgtggaagctgtggtgtggaaatcggtgaccaagaatcggacttcttatatgcgccacacctgcatagtgaatatcgctgcctcccttctggtcgccaacacctggttcattgtggtcgctgccatccaggacaatcgctacatactctgcaagacagcctgtgtggctgccaccttcttcatccacttcttctacctcagcgtcttcttctggatgctgacactgggcctcatgctgttctatcgcctggttttcattctgcatgaaacaagcaggtccactcagaaagccattgccttctgtcttggctatggctgcccacttgccatctcggtcatcacgctgggagccacccagccccgggaagtctatacgaggaagaatgtctgttggctcaactgggaggacaccaaggccctgctggctttcgccatcccagcactgatcattgtggtggtgaacataaccatcactattgtggtcatcaccaagatcctgaggccttccattggagacaagccatgcaagcaggagaagagcagcctgtttcagatcagcaagagcattggggtcctcacaccactcttgggcctcacttggggttttggtctcaccactgtgttcccagggaccaaccttgtgttccatatcatatttgccatcctcaatgtcttccagggattattcattttactctttggatgcctctgggatctgaaggtacaggaagctttgctgaataagttttcattgtcgagatggtcttcacagcactcaaagtcaacatccctgggttcatccacacctgtgttttctatgagttctccaatatcaaggagatttaacaatttgtttggtaaaacaggaacgtataatgtttccaccccagaagcaaccagctcatccctggaaaactcatccagtgcttcttcgttgctcaactaagaacaggataatccaacctacgtgacctcccggggacagtggctgtgcttttaaaaagagatgcttgcaaagcaatggggaacgtgttctcggggcaggtttccgggagcagatgccaaaaagactttttcatagagaagaggctttcttttgtaaagacagaataaaaataattgttatgtttctgtttgttccctccccctcccccttgtgtgataccacatgtgtatagtatttaagtgaaactcaagccctcaaggcccaacttctctgtctatattgtaatatagaatttcgaagagacattttcactttttacacattgggcacaaagataagctttgattaaagtagtaagtaaaaggctacctaggaaatacttcagtgaattctaagaaggaaggaaggaaggaaggaaggaaagaagggagggaaacagggagaaagggaaaaagaagaaaaagagaaagatgaaaataggaacaaataaagacaaacaacattaagggccatattgtaagatttccatgttaatgatctaatataatcactcagtgcaacattgagaattttttttttaatggctcaaaaatggaaactgaaagcaagtcatggggaatgaatactttgggcagtatcttcctgatgtcttcttagctaagaggaggaaaaaaaggctgaaaaaatagggaggaaattccttcatcagaacgacttcaagtggataacaatatttataagaaatgaatggaaggaaatatgatcctcctgagactaactttgtatgttaaggtttgaactaagtgaatgtatctgcagaggaagtattataaagatatgtcattagatccaagtgctgattaaatttttatagtttatcagaaaagccttatattttagtttgttccacattttgaaagcaaaaaatatatatttgatatacccttcaattgccaaatttgatatgttgcactgaagacagaccctgtcatatatttaatggcttcaagcaggtacttctctgtgcattatagaatagattttaataatcttatagcattgtatattattattgctgttgtcactgttattattattgtggatactggcccttggtgtgttgcatagctccctatgtattctctgtttccatctttaagttcccagaccaatatacattaagagttttgcatggtctaaattgtgtttattccaaccacgtggaaagctcctggaaagaaattttacattcggttgttctgtgctcctaatgacacttgaccttgttgaacaaatggcagagcctttcccaaggatttgattgtttgtgaattatctgcatgtgtgcttttttttggtgtgtatttcattaaaaaatataaatatttatg

SEQ ID NO: 406 - protein, 986 aa, Homo sapiens
CKKKIDVMPIQILANEEMKVMCDNNPVSLNCCSQGNVNWSKVEWKQEGKINIPGTPETDIDSSCSRYTLKADGTQCPSGSSGTTVIYTCEFISAYGARGSANIKVTFISVANLTITPDPISVSEGQNFSIKCISDVSNYDEVYWNTSAGIKIYQRFYTTRRYLDGAESVLTVKTSTREWNGTYHCIFRYKNSYSIATKDVIVHPLPLKLNIMVDPLEATVSCSGSHHIKCCIEEDGDYKVTFHMGSSSLPAAKEVNKKQVCYKHNFNASSVSWCSKTVDVCCHFTNAANNSVWSPSMKLNLVPGENITCQDPVIGVGEPGKVIQKLCRFSNVPSSPESPIGGTITYKCVGSQWEEKRNDCISAPINSLLQMAKALIKSPSQDEMLPTYLKDLSISIDKAEHEISSSPGSLGAIINILDLLSTVPTQVNSEMMTHVLSTVNVILGKPVLNTWKVLQQQWTNQSSQLLHSVERFSQALQSGDSPPLSFSQTNVQMSSTVIKSSHPETYQQRFVFPYFDLWGNVVIDKSYLENLQSDSSIVTMAFPTLQAILAQDIQENNFAESLVMTTTVSHNTTMPFRISMTFKNNSPSGGETKCVFWNFRLANNTGGWDSSGCYVEEGDGDNVTCICDHLTSFSILMSPDSPDPSSLLGILLDIISYVGVGFSILSLAACLVVEAVVWKSVTKNRTSYMRHTCIVNIAASLLVANTWFIVVAAIQDNRYILCKTACVAATFFIHFFYLSVFFWMLTLGLMLFYRLVFILHETSRSTQKAIAFCLGYGCPLAISVITLGATQPREVYTRKNVCWLNWEDTKALLAFAIPALIIVVVNITITIVVITKILRPSIGDKPCKQEKSSLFQISKSIGVLTPLLGLTWGFGLTTVFPGTNLVFHIIFAILNVFQGLFILLFGCLWDLKVQEALLNKFSLSRWSSQHSKSTSLGSSTPVFSMSSPISRRFNNLFGKTGTYNVSTPEATSSSLENSSSASSLLN

SEQ ID NO: 407 - DNA, 4798 bp, Homo sapiens
accacctcatcccgtccctacgccaagtggtgttccagggggatcggctgcccttccagtgctctgccagctacctgggcaacgacacccgcatccgctggtaccacaaccgagcccctgtggagggtgatgagcaggcgggcatcctcctggccgagagcctcatccacgactgcaccttcatcaccagtgagctgacgctgtctcacatcggcgtgtgggcctcaggcgagtgggagtgcaccgtgtccatggcccaaggcaacgccagcaagaaggtggagatcgtggtgctggagacctctgcctcctactgccccgccgagcgtgttgccaacaaccgcggggacttcaggtggccccgaactctggctggcatcacagcctaccagtcctgcctgcagtatcccttcacctcagtgcccctgggcgggggtgccccgggcacccgagcctcccgccggtgtgaccgtgccggccgctgggagccaggggactactcccactgtctctacaccaacgacatcaccagggtgctgtacaccttcgtgctgatgcccatcaatgcctccaatgcgctgaccctggctcaccagctgcgcgtgtacacagccgaggccgctagcttttcagacatgatggatgtagtctatgtggctcagatgatccagaaatttttgggttatgtcgaccagatcaaagagctggtagaggtgatggtggacatggccagcaacctgatgctggtggacgagcacctgctgtggctggcccagcgcgaggacaaggcctgcagccgcatcgtgggtgccctggagcgcattgggggggccgccctcagcccccatgcccagcacatctcagtgaatgcgaggaacgtggcattggaggcctacctcatcaagccgcacagctacgtgggcctgacctgcacagccttccagaggagggagggaggggtgccgggcacacggccaggaagccctggccagaaccccccacctgagcccgagcccccagctgaccagcagctccgcttccgctgcaccaccgggaggcccaatgtttctctgtcgtccttccacatcaagaacagcgtggccctggcctccatccagctgcccccgagtctattctcatcccttccggctgccctggctcccccggtgcccccagactgcaccctgcaactgctcgtcttccgaaatggccgcctcttccacagccacagcaacacctcccgccctggagctgctgggcctggcaagaggcgtggcgtggccacccccgtcatcttcgcaggaaccagtggctgtggcgtgggaaacctgacagagccagtggccgtttcgctgcggcactgggctgagggagccgaacctgtggccgcttggtggagccaggaggggcccggggaggctgggggctggacctcggagggctgccagctccgctccagccagcccaatgtcagcgccctgcactgccagcacttgggcaatgtggccgtgctcatggagctgagcgcctttcccagggaggtggggggcgccggggcagggctgcaccccgtggtatacccctgcacggccttgctgctgctctgcctcttcgccaccatcatcacctacatcctcaaccacagctccatccgtgtgtcccggaaaggctggcacatgctgctgaacttgtgcttccacatagccatgacctctgctgtctttgcggggggcatcacactcaccaactaccagatggtctgccaggcggtgggcatcaccctgcactactcctccctatccacgctgctctggatgggcgtgaaggcgcgagtgctccataaggagctcacctggagggcaccccctccgcaagaaggggaccccgctctgcctactcccagtcctatgctccgctgctggctggtgtggcgtccaagccttggcgccttctacatccctgtggctttgattctgctcatcacctggatctatttcctgtgcgccgggctacgcttacggggtcctctggcacagaaccccaaggcgggcaacagcagggcctccctggaggcaggggaggagctgaggggttccaccaggctcaggggcagcggccccctcctgagtgactcaggttcccttcttgctactgggagcgcgcgagtggggacgcccgggcccccggaggatggtgacagcctctattctccgggagtccagctaggggcgctggtgaccacgcacttcctgtacttggccatgtgggcctgcggggctctggcagtgtcccagcgctggctgccccgggtggtgtgcagctgcttgtacggggtggcagcctccgccctgggcctcttcgtcttcactcaccactgtgccaggcggagggacgtgagagcctcgtggcgcgcctgctgcccccctgcctctcccgcggccccccatgccccgccccgggccctgcccgccgccgcagaggacggttccccggtgttcggggaggggcccccctccctcaagtcctccccaagcggcagcagcggccatccgctggctctgggcccctgcaagctcaccaacctgcagctggcccagagtcaggtgtgcgaggcgggggcggcggccggcggggaaggagagccggagccggcgggcacccggggaaacctcgcccaccgccaccccaacaacgtgcaccacgggcgtcgggcgcacaagagccgggccaagggacaccgcgcgggggaggcctgcggcaagaaccggctcaaggccctgcgcgggggcgcggcgggggcgctggagctgctgtccagcgagagcggtagtctgcacaacagccccaccgacagctacctgggcagcagccgcaacagcccgggcgccggcctgcagctggaaggcgagcccatgctcacgccgtccgagggcagcgacaccagcgccgcgccgctttctgaggcgggccgggcaggccagcgccgcagcgccagccgcgacagtctcaagggcggcggcgcgctggagaaggagagccatcgccgctcgtacccgctcaacgccgccagcctaaacggcgcccccaaggggggcaagtacgacgacgtcaccctgatgggcgcggaggtagccagcggcggctgcatgaagaccggactctggaagagcgaaactaccgtctaaggtggggcgggcgacgcggtagacgggctggccacgcggctcgttcccccgctcctcggggccctccaaggtgtctccgtagtcagcaggttggaggcagaggagccgatggctggaggaagcccacaggcggatgttccccacttgcctagagggcatccctctggggtagcgacagacaatcccagaaacacgcataatacatttccgtccagcccggggcagtctgactgtcggtgccctcccaggaacggggaaggcctccgtctgtgtgaaagggcacagcacatcccaggtgcaccctccccaagtactcccaccccgcctactgtccatgcggcctcactgggggccatcagcctcaccagcaaagcagagatgagagcgtgggaactgtgttctttcctccctgccctctactgatttcagcccagcccctgcctagatcctaggtcccttttcctcccgagtttggctggcacgagagctagcccagcacatgaagcaggtgatgttaagtcacaaggtgctgcttttcagatccactatgcaagaggggagggtggggccacgtgaaaggcagctctagacatcaaccagtcctgggggaggggagtgggaaccgggcacaactaggaacaatgccaccattcccacaggagtggtacttaaaccagacagcagggttcagaggtggcacaccgggacaaagctgaggccctgcacctcaacagctgactgccaggtgcctgtgggtgaactgaggggagtagagggagagggcaggtggaactggggcagaatctagtcatgccctaaagctagtcctgtaaacaatggtgccccagaaagctgcaggtggtgtttggagaagcagttacttttcagttacaagacccatctccctagtctcagccttacaacaccacgggactaaggaagagcacttccttgcctccgtaaggccagaggaagaaccatcccaatcatttgatctccagctccacagtagagagaaacctacaaaatgtcaaaccagcttcccgactcccaggagctcaagccaagcccagaggcagtggctggggtccctgcaggtcatgaggggcctatgcctttactccttttaaacaccagcacccgtcttttccccaacctaaaaccaaccaccagcatttcactacaggaccaaatggaaaccgagggaaccctgggtcttgggaagaacaacaggaaaccaaggtctgacctagggttccctcccagtcttcacatcactctggcctcatcaccaaggtgacagaggacacaggggagggggaaaacccacacacactccttggaatgggtcctgttatttatgcttgctgcacagacatattagaagaaaaaaaaaagctttgtattattcttccacatatgctggctgctgtttacacaccctgccaatgccttagcactggagagctttttgcaatatgctggggaaaggggagggagggaatgaaagtgccaaagaaaacatgtttttaagaactcgggttttatacaatagaatgttttctagcagatgcctcttgttttaatatattaaaattttgcaaagccctttg

SEQ ID NO: 408 - protein, 1060 aa, Homo sapiens
HLIPSLRQVVFQGDRLPFQCSASYLGNDTRIRWYHNRAPVEGDEQAGILLAESLIHDCTFITSELTLSHIGVWASGEWECTVSMAQGNASKKVEIVVLETSASYCPAERVANNRGDFRWPRTLAGITAYQSCLQYPFTSVPLGGGAPGTRASRRCDRAGRWEPGDYSHCLYTNDITRVLYTFVLMPINASNALTLAHQLRVYTAEAASFSDMMDVVYVAQMIQKFLGYVDQIKELVEVMVDMASNLMLVDEHLLWLAQREDKACSRIVGALERIGGAALSPHAQHISVNARNVALEAYLIKPHSYVGLTCTAFQRREGGVPGTRPGSPGQNPPPEPEPPADQQLRFRCTTGRPNVSLSSFHIKNSVALASIQLPPSLFSSLPAALAPPVPPDCTLQLLVFRNGRLFHSHSNTSRPGAAGPGKRRGVATPVIFAGTSGCGVGNLTEPVAVSLRHWAEGAEPVAAWWSQEGPGEAGGWTSEGCQLRSSQPNVSALHCQHLGNVAVLMELSAFPREVGGAGAGLHPVVYPCTALLLLCLFATIITYILNHSSIRVSRKGWHMLLNLCFHIAMTSAVFAGGITLTNYQMVCQAVGITLHYSSLSTLLWMGVKARVLHKELTWRAPPPQEGDPALPTPSPMLRCWLVWRPSLGAFYIPVALILLITWIYFLCAGLRLRGPLAQNPKAGNSRASLEAGEELRGSTRLRGSGPLLSDSGSLLATGSARVGTPGPPEDGDSLYSPGVQLGALVTTHFLYLAMWACGALAVSQRWLPRVVCSCLYGVAASALGLFVFTHHCARRRDVRASWRACCPPASPAAPHAPPRALPAAAEDGSPVFGEGPPSLKSSPSGSSGHPLALGPCKLTNLQLAQSQVCEAGAAAGGEGEPEPAGTRGNLAHRHPNNVHHGRRAHKSRAKGHRAGEACGKNRLKALRGGAAGALELLSSESGSLHNSPTDSYLGSSRNSPGAGLQLEGEPMLTPSEGSDTSAAPLSEAGRAGQRRSASRDSLKGGGALEKESHRRSYPLNAASLNGAPKGGKYDDVTLMGAEVASGGCMKTGLWKSETTV

SEQ ID NO: 409 - DNA, 1119 bp, Homo sapiens
atgttagccaacagctcctcaaccaacagttctgttctcccgtgtcctgactaccgacctacccaccgcctgcacttggtggtctacagcttggtgctggctgccgggctccccctcaacgcgctagccctctgggtcttcctgcgcgcgctgcgcgtgcactcggtggtgagcgtgtacatgtgtaacctggcggccagcgacctgctcttcaccctctcgctgcccgttcgtctctcctactacgcactgcaccactggcccttccccgacctcctgtgccagacgacgggcgccatcttccagatgaacatgtacggcagctgcatcttcctgatgctcatcaacgtggaccgctacgccgccatcgtgcacccgctgcgactgcgccacctgcggcggccccgcgtggcgcggctgctctgcctgggcgtgtgggcgctcatcctggtgtttgccgtgcccgccgcccgcgtgcacaggccctcgcgttgccgctaccgggacctcgaggtgcgcctatgcttcgagagcttcagcgacgagctgtggaaaggcaggctgctgcccctcgtgctgctggccgaggcgctgggcttcctgctgcccctggcggcggtggtctactcgtcgggccgagtcttctggacgctggcgcgccccgacgccacgcagagccagcggcggcggaagaccgtgcgcctcctgctggctaacctcgtcatcttcctgctgtgcttcgtgccctacaacagcacgctggcggtctacgggctgctgcggagcaagctggtggcggccagcgtgcctgcccgcgatcgcgtgcgcggggtgctgatggtgatggtgctgctggccggcgccaactgcgtgctggacccgctggtgtactactttagcgccgagggcttccgcaacaccctgcgcggcctgggcactccgcaccgggccaggacctcggccaccaacgggacgcgggcggcgctcgcgcaatccgaaaggtccgccgtcaccaccgacgccaccaggccggatgccgccagtcaggggctgctccgaccctccgactcccactctctgtcttccttcacacagtgtccccaggattccgccctctga

SEQ ID NO: 410 - protein, 372 aa, Homo sapiens [sequence omitted]

SEQ ID NO: 411 - DNA, 6533 bp, Homo sapiens
gaaaaacacgagccgtgttgtatgtggaggccccggtgtctgggtgtaattctcgttccttctgtgaggtgaggcagatgaagccatttcgtggttctgctgagcatggtcttggcagtgtttttgggagcatcacactgtgccccttttgttaacttgctagcccggcctgtcttttgccccgggctcaatggctggattgtggaaactgcacccgccttcaggttgttgagcaactgatgggacgatctcagggaccggcgtttacgaaagaaatgtttaatttggtaaattggaggaaaaaaacatggatttttagcaattgaagagcaaattaaggtttcagatttgggatattggtgtttctgttttggagaaattattctttttctttttaatttgaagaaaaatcatcagtcttggaatacagaagagaaactagaaatatacgtattttgtttcacatttgaacagtcattcttgaggaatactccatacctgagtagacagccatgtggccatcgcagctactaattttcatgatgctcttagctccaataattcatgctttcagccgtgccccaattccaatggctgtggtccgcagagagctatcctgtgagagctatcctatagagcttcgctgtccaggaacagacgtcatcatgatagaaagtgccaactatggcaggactgatgacaaaatttgtgactctgaccctgctcagatggagaatatccgatgttatctgccagatgcctataagattatgtctcaaagatgcaataacagaacccagtgtgcagtggtggcaggtcctgatgtttttccagacccgtgtccaggaacctataaataccttgaagtgcagtatgaatgtgtcccttacaaagtggaacaaaaagtttttctttgtcctggactactaaaaggagtataccagagtgaacatttgtttgagtccgaccaccaatctggggcgtggtgcaaagaccctctgcaggcatctgacaagatttattatatgccctggactccctacagaactgataccctgactgagtattcatccaaggatgacttcattgctggaagaccaactacaacctacaagctccctcatagggtggatggcacaggatttgtagtgtatgatggagctttgttcttcaacaaagagcgcaccaggaacatagtaaagtttgatttgcggactaggataaagagtggagaggctatcatagcaaatgccaattaccatgatacctccccttaccgatggggaggcaaatctgacatagacctggcagtagatgagaatgggctatgggtaatctatgcaacagaacaaaacaatggtaaaattgtcattagtcaattgaacccttacaccctacggatcgaaggaacatgggatactgcatatgataaaaggtcagcttccaatgcctttatgatttgtggaattctgtatgtggtcaaatctgtatatgaggatgatgacaatgaggctactggaaataagattgactacatttacaacactgaccaaagcaaggatagtttggtggatgtaccctttcctaattcataccagtacattgcagctgtggattacaaccccagggacaacctactttatgtatggaataactatcacgtcgtgaaatattctttggattttggacctctggatagtagatcagggcaggcacatcatggacaagtttcatacatttctccgccaattcaccttgactctgagctagaaagaccctctgttaaagatatctctaccacaggacctcttggcatgggaagcactaccaccagtaccacccttcggaccacaactttgagcccaggaaggagtaccaccccgtcagtgtcaggaagaagaaaccggagtactagtaccccatctccagctgtcgaggtacttgatgacatgaccacacaccttccatcagcatcgtcccaaatcccagctctcgaagagagctgtgaggctgtggaagcccgagaaatcatgtggtttaagactcgtcaaggacagatagcaaagcagccatgccctgcaggaactataggtgtatcaacttatctatgccttgctcctgatggaatttgggatccccaaggtccagatctcagcaactgttcttctccttgggtcaatcatataacacagaagttgaaatctggtgaaacagctgccaacattgctagagagctggctgaacagacaagaaatcacttgaatgctggggacatcacctactctgtccgggccatggaccagctggtaggcctcctagatgtacagcttcggaacttgaccccaggtggaaaagatagtgctgcccggagtttgaacaagcttcagaaaagagagcgctcttgcagagcctatgtccaggcaatggtcgagacagttaacaacctccttcagccacaagctttgaatgcatggagagacctgactacgagtgatcagctgcgtgcggccaccatgttgcttcatactgtggaggaaagtgcttttgtgctggctgataaccttttgaagactgacattgtcagggagaatacagacaatattaaattggaagttgcaagactgagcacagaaggaaacttagaagacctaaaatttccagaaaacatgggccatggaagcactatccagctgtctgcaaataccttaaagcaaaatggccgaaatggagagatcagagtggcctttgtcctgtataacaacttgggtccttatttatccacggagaatgccagtatgaagttgggaacggaagctttgtccacaaatcattctgttattgtcaattcccctgttattacggcagcaataaacaaagagttcagtaacaaggtttatttggctgatcctgtggtatttactgttaaacatatcaagcagtcagaggaaaatttcaaccctaactgttcattttggagctactccaagcgtacaatgacaggttattggtcaacacaaggctgtcggctcctgacaacaaataagacacatactacatgctcttgtaaccacctaacaaattttgcagtactgatggcacatgtggaagttaagcacagtgatgcggtccatgacctccttctggatgtgatcacgtgggttggaattttgctgtcccttgtttgtctcctgatttgcatcttcacattttgctttttccgcgggctccagagtgaccgtaacaccatccacaagaacctctgcatcagtctctttgtagcagagctgctcttcctgattgggatcaaccgaactgaccaaccaattgcctgtgctgttttcgctgccctgttacatttcttcttcttggctgccttcacctggatgttcctggagggggtgcagctttatatcatgctggtggaggtttttgagagtgaacattcacgtaggaaatacttttatctggtcggctatgggatgcctgcactcattgtggctgtgtcagctgcagtagactacaggagttatggaacagataaagtatgttggctccgacttgacacctacttcatttggagttttataggaccagcaactttgataattatgcttaatgtaatcttccttgggattgctttatataaaatgtttcatcatactgctatactgaaacctgaatcaggctgtcttgataacatcaactatgaggataacagacccttcatcaagtcatgggttataggtgcaatagctcttctctgcctattaggattgacctgggcctttggactcatgtatattaatgaaagcacagtcatcatggcctatctcttcaccattttcaattctctacagggaatgtttatatttattttccattgtgtcctacagaagaaggtacgaaaagagtatgggaaatgcctgcgaacacattgctgtagtggcaaaagtacagagagttccattggttcagggaaaacatctggttctcgaactcctggacgctactccacaggctcacagagccgaatccgtagaatgtggaatgacacggttcgaaagcagtcagagtcttcctttattactggagacataaacagttcagcgtcactcaacagagagccctacagagagacaagtatgggagtaaagctaaacattgcatatcaaataggggcttctgaacaatgccagggatacaagtgtcatggatactctaccactgaatggtaaccatggcaatagttacagcattgccagcggcgaatacctgagcaactgtgtgcaaatcatagaccgtggctataaccataacgagaccgccctagagaaaaagattctgaaggaactcactcccaactatatcccttcttacctgaacaaccatgagcgctccagtgaacagaacaggaatctgatgaacaagctggtgaataaccttggcagtggaagggaagatgatgccattgtcctggatgatgccacctcgtttaaccacgaggagagtttgggcctggaactcattcatgaggaatctgatgctcctttgctgcccccaagagtatactccaccgagaaccaccagccacaccattataccagaaggcggatcccccaagaccacagtgagagctttttccctttgctaaccaacgagcacacagaagatctccagtcaccccatagagactctctctataccagcatgccgacactggctggtgtggccgccacagagagtgttaccaccagcacccagaccgaacccccaccggccaaatgtggtgatgccgaagatgtttactacaaaagcatgccaaacctaggctccagaaaccacgtccatcagctgcatacttactaccagctaggtcgcggcagcagtgatggatttatagttcctccaaacaaagatgggacccctcccgagggaagttcaaaaggaccggctcatttggtcactagtctatagaagatgacacagaaattggaaccaacaaaactgctaacaccttgttgactgttctgagttgatataagcagtggtaataatgtgtgtactcctaaatctttatgctgtcctctaaagacaaacacaaactctcagacttttttttttttaatgggatttttaggtcagcccaggggagaaagataactgctaaaattcccctgtaccccatcctttcttgtcctttccccttcagatggagacttcattatgttaatgaacaagatatgaagaaaatggcactcattgtggccttgttgaattatgttgtgtatgttttaacatctctgatgctgtgttactaaaattacaaggacctgctttttaaaaggccagaacaattgtctgaaattagtaacaatgctgcatctagattggagtgctgcacaaacaaacataagagcaaagcaaaactgtatcacatagggtttttggtcactcacaacctgaattcaccacagctggaatagctgtggaaaacaaaataaaacaacaaaattaataatgaaatggaggggaattctagaattatatgctaaatgcatattttatgatttgctgtattaactgatgataaaactaatggcagaaaaagaagttgagcaatttctatgtaatgtacagatactagcattgcacatatagtctgctttctgttcctccagaatttgagtcctgttaatgtagtagaaaaaaaaaaaagaaattttctttttcttttgtgctggtcttgcaagtttgtctaccagtaagagagcaaagtttccttcctttcttctctttcttcattttctttttttcttttttgccttttattcctttaaaatttcgcctggcaaaaaataaataaatggaactatcactttataagaatcattttctagtaatgcaaacaaattattttttacaaaaaaacaaaataaataaaattagacttccttccctcactatatatctttatgcagtcagaatatttccaacagtgttttttgcaaattagagcaggacaaacttttatgtttacagggcacgtctgttgtaatgcaaagcatatttggcaagcagttcatcaccaggacactagctatgattctagaagtcaaaaggtgtctatagaactagtggggcttctgcatgtgaaaaacggttttccataggcattaaagtgctgaatgctcagtctgatcaacaagtgggcacctgcactaccactttttagaggaaattcactccctcgtaagcattggaaggtcaaattattttgaagtgattttttttaaaaaaaagtcttctgtttattaacaggaaaatttatttatttgacaggattttgagtaatgtaggaatacaaaaggtaaattagcagcacatataatttttttttaatttatgatccattttgtatggtctcaaagttggatgacctcattactaatatttgttgtaaaagtgaaacttgtttgccaaccaataaacaactgattgagatttagaagatattgtaaaaaaaaaaaaaaaaa

SEQ ID NO: 412 - protein, 1240 aa, Homo sapiens
MWPSQLLIFMMLLAPIIHAFSRAPIPMAVVRRELSCESYPIELRCPGTDVIMIESANYGRTDDKICDSDPAQMENIRCYLPDAYKIMSQRCNNRTQCAVVAGPDVFPDPCPGTYKYLEVQYECVPYKVEQKVFLCPGLLKGVYQSEHLFESDHQSGAWCKDPLQASDKIYYMPWTPYRTDTLTEYSSKDDFIAGRPTTTYKLPHRVDGTGFVVYDGALFFNKERTRNIVKFDLRTRIKSGEAIIANANYHDTSPYRWGGKSDIDLAVDENGLWVIYATEQNNGKIVISQLNPYTLRIEGTWDTAYDKRSASNAFMICGILYVVKSVYEDDDNEATGNKIDYIYNTDQSKDSLVDVPFPNSYQYIAAVDYNPRDNLLYVWNNYHVVKYSLDFGPLDSRSGQAHHGQVSYISPPIHLDSELERPSVKDISTTGPLGMGSTTTSTTLRTTTLSPGRSTTPSVSGRRNRSTSTPSPAVEVLDDMTTHLPSASSQIPALEESCEAVEAREIMWFKTRQGQIAKQPCPAGTIGVSTYLCLAPDGIWDPQGPDLSNCSSPWVNHITQKLKSGETAANIARELAEQTRNHLNAGDITYSVRAMDQLVGLLDVQLRNLTPGGKDSAARSLNKLQKRERSCRAYVQAMVETVNNLLQPQALNAWRDLTTSDQLRAATMLLHTVEESAFVLADNLLKTDIVRENTDNIKLEVARLSTEGNLEDLKFPENMGHGSTIQLSANTLKQNGRNGEIRVAFVLYNNLGPYLSTENASMKLGTEALSTNHSVIVNSPVITAAINKEFSNKVYLADPVVFTVKHIKQSEENFNPNCSFWSYSKRTMTGYWSTQGCRLLTTNKTHTTCSCNHLTNFAVLMAHVEVKHSDAVHDLLLDVITWVGILLSLVCLLICIFTFCFFRGLQSDRNTIHKNLCISLFVAELLFLIGINRTDQPIACAVFAALLHFFFLAAFTWMFLEGVQLYIMLVEVFESEHSRRKYFYLVGYGMPALIVAVSAAVDYRSYGTDKVCWLRLDTYFIWSFIGPATLIIMLNVIFLGIALYKMFHHTAILKPESGCLDNINYEDNRPFIKSWVIGAIALLCLLGLTWAFGLMYINESTVIMAYLFTIFNSLQGMFIFIFHCVLQKKVRKEYGKCLRTHCCSGKSTESSIGSGKTSGSRTPGRYSTGSQSRIRRMWNDTVRKQSESSFITGDINSSASLNREPYRETSMGVKLNIAYQIGASEQCQGYKCHGYSTTEW

SEQ ID NO: 413 - DNA, 1146 bp, Homo sapiens
atgagaagtcataccataacaatgacgacaacttcagtcagcagctggccttactcctcccacagaatgcgctttataaccaatcatagcgaccaaccgccacaaaacttctcagcaacaccaaatgttactacctgtcccatggatgaaaaattgctatctactgtgttaaccacatcctactctgttattttcatcgtgggactggttgggaacataatcgccctctatgtatttctgggtattcaccgtaaaagaaattccattcaaatttatctacttaacgtagccattgcagacctcctactcatcttctgcctccctttccgaataatgtatcatattaaccaaaacaagtggacactaggtgtgattctgtgcaaggttgtgggaacactgttttatatgaacatgtacattagcattattttgcttggattcatcagtttggatcgctatataaaaattaatcggtctatacagcaacggaaggcaataacaaccaaacaaagtatttatgtctgttgtatagtatggatgcttgctcttggtggattcctaactatgattattttaacacttaagaaaggagggcataattccacaatgtgtttccattacagagataagcataacgcaaaaggagaagccatttttaacttcattcttgtggtaatgttctggctaattttcttactaataatcctttcatatattaagattgggaagaatctattgaggatttctaaaaggaggtcaaaatttcctaattctggtaaatatgccactacagctcgtaactcctttattgtacttatcatttttactatatgttttgttccctatcatgcctttcgattcatctacatttcttcacagctaaatgtatcatcttgctactggaaagaaattgttcacaaaaccaatgagatcatgctggttctctcatctttcaatagttgcttagatccagtcatgtatttcctgatgtccagtaacattcgcaaaataatgtgccaacttctttttagacgatttcaaggtgaaccaagtaggagtgaaagcacttcagaatttaaaccaggatactccctgcatgatacatctgtggcagtgaaaatacagtctagttctaaaagtacttga

SEQ ID NO: 414 - protein, 381 aa, Homo sapiens
MRSHTITMTTTSVSSWPYSSHRMRFITNHSDQPPQNFSATPNVTTCPMDEKLLSTVLTTSYSVIFIVGLVGNIIALYVFLGIHRKRNSIQIYLLNVAIADLLLIFCLPFRIMYHINQNKWTLGVILCKVVGTLFYMNMYISIILLGFISLDRYIKINRSIQQRKAITTKQSIYVCCIVWMLALGGFLTMIILTLKKGGHNSTMCFHYRDKHNAKGEAIFNFILVVMFWLIFLLIILSYIKIGKNLLRISKRRSKFPNSGKYATTARNSFIVLIIFTICFVPYHAFRFIYISSQLNVSSCYWKEIVHKTNEIMLVLSSFNSCLDPVMYFLMSSNIRKIMCQLLFRRFQGEPSRSESTSEFKPGYSLHDTSVAVKIQSSSKST

SEQ ID NO: 415 - DNA, 2667 bp, Homo sapiens
gttctcagatcggcttctcgcaacaggcagtcagttctcactgggccccttggactcccatttcaaaaatggagaagacagatcacagccactgaccagggaccgtgggaggtgccacgtgatggtgaggcatcatgctagggagctgagctctgaccttcctgctgggtgattctccacctctgggctgctagatctacttcctggatgccgtgaagatcctcatgtatgaaaatgaagtcccaggcaaccatgatttgctgcttagtgttctttctgtccacagaatgttcccactatagatccaagattcacctaaaaagctatagtgaagtggccaaccacatcctcgacacagcagccatttcaaactgggctttcattcccaacaaaaatgccagctcggatttgttgcagtcagtgaatttgtttgccagacaactccacatccacaataattctgagaacattgtgaatgaactcttcattcagacaaaagggtttcacatcaaccataatacctcagagaaaagcctcaatttctccatgagcatgaacaataccacagaagatatcttaggaatggtacagattcccaggcaagagctaaggaagctgtggccaaatgcatcccaagccattagcatagctttcccaaccttgggggctatcctgagagaagcccacttgcaaaatgtgagtcttcccagacaggtaaatggtctggtgctatcagtggttttaccagaaaggttgcaagaaatcatactcaccttcgaaaagatcaataaaacccgcaatgccagagcccagtgtgttggctggcactccaagaaaaggagatgggatgagaaagcgtgccaaatgatgttggatatcaggaacgaagtgaaatgccgctgtaactacaccagtgtggtgatgtctttttccattctcatgtcctccaaatcgatgaccgacaaagttctggactacatcacctgcattgggctcagcgtctcaatcctaagcttggttctttgcctgatcattgaagccacagtgtggtcccgggtggttgtgacggagatatcatacatgcgtcacgtgtgcatcgtgaatatagcagtgtcccttctgactgccaatgtgtggtttatcataggctctcactttaacattaaggcccaggactacaacatgtgtgttgcagtgacatttttcagccactttttctacctctctctgtttttctggatgctcttcaaagcattgctcatcatttatggaatattggtcattttccgtaggatgatgaagtcccgaatgatggtcattggctttgccattggctatgggtgcccattgatcattgctgtcactacagttgctatcacagagccagagaacggctacatgagacctgaggcctgttggcttaactgggacaataccaaagcccttttagcatttgccatcccggcgttcgtcattgtggctgtaaatctgattgtggttttggttgttgctgtcaacactcagaggccctctattggcagttccaagtctcaggatgtggtcataattatgaggatcagcaaaaatgttgccatcctcactccactgctgggactgacctggggttttggaatagccactctcatagaaggcacttccttgacgttccatataatttttgccttgctcaatgctttccagggttttttcatcctgctgtttggaaccattatggatcacaagataagagatgctttgaggatgaggatgtcttcactgaaggggaaatcgagggcagctgagaatgcatcactaggcccaaccaatggatctaaattaatgaatcgtcaaggatgaaatgctgccccatttctcatggatgtcctgagaccaagaggggagatccaggagaaagaggccatggaaagcaggctggagtgaggaggaatggtcatgcttccttggaagactttctcttcttgtcaggagtgactcccaagctcttggtcggccgaagaaaaactgaggataacatttgctgactgggctttaaggagcatgatttatggaccccttaacctacccgtgccctgcaagaggctggcttcttggtcaatcttgactagattaagagtcaatctgcaagccattttatggtctccctggccagctgggggctgtagggccctgctgggcttggtcgtctttcactcctgaggcctgctctgtggctccatagctcagtcctccatcactctgcgtggatcctgggtactttggacagtgagggttcgatccaattttaggggtagggttgggggtgggagtgggagtgtgggttggcaggaggaagaatgagtctactttggagacaattaagtcatggtacgtttcctaaagatagggaacggaagaaaagcaagagaactgtttaatatgctgattattttagtctattttagaccttgagtaaactaatttagcttctaggatccaagtttccttatttgtgaaacaggaaaaaaaaattcttgtaggtattactgtttgtgtgtttgagtttactgcacatgtttgtgtttgtgtatatgtgtcttttaaaaatactatatataaagaagattctggttgttattttagacataaacgaatatatgtacctttcac

SEQ ID NO: 416 - protein, 542 aa, Homo sapiens
MKMKSQATMICCLVFFLSTECSHYRSKIHLKSYSEVANHILDTAAISNWAFIPNKNASSDLLQSVNLFARQLHIHNNSENIVNELFIQTKGFHINHNTSEKSLNFSMSMNNTTEDILGMVQIPRQELRKLWPNASQAISIAFPTLGAILREAHLQNVSLPRQVNGLVLSVVLPERLQEIILTFEKINKTRNARAQCVGWHSKKRRWDEKACQMMLDIRNEVKCRCNYTSVVMSFSILMSSKSMTDKVLDYITCIGLSVSILSLVLCLIIEATVWSRVVVTEISYMRHVCIVNIAVSLLTANVWFIIGSHFNIKAQDYNMCVAVTFFSHFFYLSLFFWMLFKALLIIYGILVIFRRMMKSRMMVIGFAIGYGCPLIIAVTTVAITEPENGYMRPEACWLNWDNTKALLAFAIPAFVIVAVNLIVVLVVAVNTQRPSIGSSKSQDVVIIMRISKNVAILTPLLGLTWGFGIATLIEGTSLTFHIIFALLNAFQGFFILLFGTIMDHKIRDALRMRMSSLKGKSRAAENASLGPTNGSKLMNRQG

SEQ ID NO: 417 - DNA, 1402 bp, Homo sapiens
ggcacgagggtttcgttttcatgctttaccagaaaatccacttccctgccgaccttagtttcaaagcttattcttaattagagacaagaaacctgtttcaacttgaagacaccgtatgaggtgaatggacagccagccaccacaatgaaagaaatcaaaccaggaataacctatgctgaacccacgcctcaatcgtccccaagtgtttcctgacacgcatctttgcttacagtgcatcacaactgaagaatggggttcaacttgacgcttgcaaaattaccaaataacgagctgcacggccaagagagtcacaattcaggcaacaggagcgacgggccaggaaagaacaccacccttcacaatgaatttgacacaattgtcttgccggtgctttatctcattatatttgtggcaagcatcttgctgaatggtttagcagtgtggatcttcttccacattaggaataaaaccagcttcatattctatctcaaaaacatagtggttgcagacctcataatgacgctgacatttccatttcgaatagtccatgatgcaggatttggaccttggtacttcaagtttattctctgcagatacacttcagttttgttttatgcaaacatgtatacttccatcgtgttccttgggctgataagcattgatcgctatctgaaggtggtcaagccatttggggactctcggatgtacagcataaccttcacgaaggttttatctgtttgtgtttgggtgatcatggctgttttgtctttgccaaacatcatcctgacaaatggtcagccaacagaggacaatatccatgactgctcaaaacttaaaagtcctttgggggtcaaatggcatacggcagtcacctatgtgaacagctgcttgtttgtggccgtgctggtgattctgatcggatgttacatagccatatccaggtacatccacaaatccagcaggcaattcataagtcagtcaagccgaaagcgaaaacataaccagagcatcagggttgttgtggctgtgttttttacctgctttctaccatatcacttgtgcagaattccttttacttttagtcacttagacaggcttttagatgaatctgcacaaaaaatcctatattactgcaaagaaattacacttttcttgtctgcgtgtaatgtttgcctggatccaataatttactttttcatgtgtaggtcattttcaagaaggctgttcaaaaaatcaaatatcagaaccaggagtgaaagcatcagatcactgcaaagtgtgagaagatcggaagttcgcatatattatgattacactgatgtgtaggccttttattgtttgttggaatcgatatgtacaaagtgtaaataaatgtttcttttcattatccttaaaaaaaaaa

SEQ ID NO: 418 - protein, 358 aa, Homo sapiens
MGFNLTLAKLPNNELHGQESHNSGNRSDGPGKNTTLHNEFDTIVLPVLYLIIFVASILLNGLAVWIFFHIRNKTSFIFYLKNIVVADLIMTLTFPFRIVHDAGFGPWYFKFILCRYTSVLFYANMYTSIVFLGLISIDRYLKVVKPFGDSRMYSITFTKVLSVCVWVIMAVLSLPNIILTNGQPTEDNIHDCSKLKSPLGVKWHTAVTYVNSCLFVAVLVILIGCYIAISRYIHKSSRQFISQSSRKRKHNQSIRVVVAVFFTCFLPYHLCRIPFTFSHLDRLLDESAQKILYYCKEITLFLSACNVCLDPIIYFFMCRSFSRRLFKKSNIRTRSESIRSLQSVRRSEVRIYYDYTDV

SEQ ID NO: 419 - DNA, 1382 bp, Homo sapiens
ggccttatctttccagtcgtccagcatgctctgcccaccccacgccgaggtgcactgaccatgagcctcaactcctccctcagctgcaggaaggagctgagtaatctcactgaggaggagggtggcgaagggggcgtcatcatcacccagttcatcgccatcattgtcatcaccatttttgtctgcctgggaaacctggtcatcgtggtcaccttgtacaagaagtcctacctcctcaccctcagcaacaagttcgtcttcagcctgactctgtccaacttcctgctgtccgtgttggtgctgccttttgtggtgacgagctccatccgcagggaatggatctttggtgtagtgtggtgcaacttctctgccctcctctacctgctgatcagctctgccagcatgctaaccctcggggtcattgccatcgaccgctactatgctgtcctgtaccccatggtgtaccccatgaagatcacagggaaccgggctgtgatggcacttgtctacatctggcttcactcgctcatcggctgcctgccacccctgtttggttggtcatccgtggagtttgacgagttcaaatggatgtgtgtggctgcttggcaccgggagcctggctacacggccttctggcagatctggtgtgccctcttcccctttctggtcatgctggtgtgctatggcttcatcttccgcgtggccagggtcaaggcacgcaaggtgcactgtggcacagtcgtcatcgtggaggaggatgctcagaggaccgggaggaagaactccagcacctccacctcctcttcaggcagcaggaggaatgcctttcagggtgtggtctactcggccaaccagtgcaaagccctcatcaccatcctggtggtcctcggtgccttcatggtcacctggggcccctacatggttgtcatcgcctctgaggccctctgggggaaaagctccgtctccccgagcctggagacttgggccacatggctgtcctttgccagcgctgtctgccaccccctgatctatggactctggaacaagacagttcgcaaagaactactgggcatgtgctttggggaccggtattatcgggaaccatttgtgcaacgacagaggacttccaggctcttcagcatttccaacaggatcacagacctgggcctgtccccacacctcactgcgctcatggcaggtggacagcccctggggcacagcagcagcacgggggacactggcttcagctgctcccaggactcaggtaacctgcgtgctttataagcctctcacctgtcgcgttttccctgtgttgcgtttcccccgtgtcgcgtttcccctgtgcaggctcaagagctggcggaggggcatttcccacggtg

SEQ ID NO: 420 - protein, 407 aa, Homo sapiens
MSLNSSLSCRKELSNLTEEEGGEGGVIITQFIAIIVITIFVCLGNLVIVVTLYKKSYLLTLSNKFVFSLTLSNFLLSVLVLPFVVTSSIRREWIFGVVWCNFSALLYLLISSASMLTLGVIAIDRYYAVLYPMVYPMKITGNRAVMALVYIWLHSLIGCLPPLFGWSSVEFDEFKWMCVAAWHREPGYTAFWQIWCALFPFLVMLVCYGFIFRVARVKARKVHCGTVVIVEEDAQRTGRKNSSTSTSSSGSRRNAFQGVVYSANQCKALITILVVLGAFMVTWGPYMVVIASEALWGKSSVSPSLETWATWLSFASAVCHPLIYGLWNKTVRKELLGMCFGDRYYREPFVQRQRTSRLFSISNRITDLGLSPHLTALMAGGQPLGHSSSTGDTGFSCSQDSGNLRAL

SEQ ID NO: 421 - DNA, 2724 bp, Homo sapiens
atggacacctcccggctcggtgtgctcctgtccttgcctgtgctgctgcagctggcgaccgggggcagctctcccaggtctggtgtgttgctgaggggctgccccacacactgtcattgcgagcccgacggcaggatgttgctcagggtggactgctccgacctggggctctcggagctgccttccaacctcagcgtcttcacctcctacctagacctcagtatgaacaacatcagtcagctgctcccgaatcccctgcccagtctccgcttcctggaggagttacgtcttgcgggaaacgctctgacatacattcccaagggagcattcactggcctttacagtcttaaagttcttatgctgcagaataatcagctaagacacgtacccacagaagctctgcagaatttgcgaagccttcaatccctgcgtctggatgctaaccacatcagctatgtgcccccaagctgtttcagtggcctgcattccctgaggcacctgtggctggatgacaatgcgttaacagaaatccccgtccaggcttttagaagtttatcggcattgcaagccatgaccttggccctgaacaaaatacaccacataccagactatgcctttggaaacctctccagcttggtagttctacatctccataacaatagaatccactccctgggaaagaaatgctttgatgggctccacagcctagagactttagatttaaattacaataaccttgatgaattccccactgcaattaggacactctccaaccttaaagaactaggatttcatagcaacaatatcaggtcgatacctgagaaagcatttgtaggcaacccttctcttattacaatacatttctatgacaatcccatccaatttgttgggagatctgcttttcaacatttacctgaactaagaacactgactctgaatggtgcctcacaaataactgaatttcctgatttaactggaactgcaaacctggagagtctgactttaactggagcacagatctcatctcttcctcaaaccgtctgcaatcagttacctaatctccaagtgctagatctgtcttacaacctattagaagatttacccagtttttcagtctgccaaaagcttcagaaaattgacctaagacataatgaaatctacgaaattaaagttgacactttccagcagttgcttagcctccgatcgctgaatttggcttggaacaaaattgctattattcaccccaatgcattttccactttgccatccctaataaagctggacctatcgtccaacctcctgtcgtcttttcctataactgggttacatggtttaactcacttaaaattaacaggaaatcatgccttacagagcttgatatcatctgaaaactttccagaactcaaggttatagaaatgccttatgcttaccagtgctgtgcatttggagtgtgtgagaatgcctataagatttctaatcaatggaataaaggtgacaacagcagtatggacgaccttcataagaaagatgctggaatgtttcaggctcaagatgaacgtgaccttgaagatttcctgcttgactttgaggaagacctgaaagcccttcattcagtgcagtgttcaccttccccaggccccttcaaaccctgtgaacacctgcttgatggctggctgatcagaattggagtgtggaccatagcagttctggcacttacttgtaatgctttggtgacttcaacagttttcagatcccctctgtacatttcccccattaaactgttaattggggtcatcgcagcagtgaacatgctcacgggagtctccagtgccgtgctggctggtgtggatgcgttcacttttggcagctttgcacgacatggtgcctggtgggagaatggggttggttgccatgtcattggttttttgtccatttttgcttcagaatcatctgttttcctgcttactctggcagccctggagcgtgggttctctgtgaaatattctgcaaaatttgaaacgaaagctccattttctagcctgaaagtaatcattttgctctgtgccctgctggccttgaccatggccgcagttcccctgctgggtggcagcaagtatggcgcctcccctctctgcctgcctttgccttttggggagcccagcaccatgggctacatggtcgctctcatcttgctcaattccctttgcttcctcatgatgaccattgcctacaccaagctctactgcaatttggacaagggagacctggagaatatttgggactgctctatggtaaaacacattgccctgttgctcttcaccaactgcatcctaaactgccctgtggctttcttgtccttctcctctttaataaaccttacatttatcagtcctgaagtaattaagtttatccttctggtggtagtcccacttcctgcatgtctcaatccccttctctacatcttgttcaatcctcactttaaggaggatctggtgagcctgagaaagcaaacctacgtctggacaagatcaaaacacccaagcttgatgtcaattaactctgatgatgtcgaaaaacagtcctgtgactcaactcaagccttggtaacctttaccagctccagcatcacttatgacctgcctcccagttccgtgccatcaccagcttatccagtgactgagagctgccatctttcctctgtggcatttgtcccatgtctctaa

SEQ ID NO: 422 - protein, 907 aa, Homo sapiens
MDTSRLGVLLSLPVLLQLATGGSSPRSGVLLRGCPTHCHCEPDGRMLLRVDCSDLGLSELPSNLSVFTSYLDLSMNNISQLLPNPLPSLRFLEELRLAGNALTYIPKGAFTGLYSLKVLMLQNNQLRHVPTEALQNLRSLQSLRLDANHISYVPPSCFSGLHSLRHLWLDDNALTEIPVQAFRSLSALQAMTLALNKIHHIPDYAFGNLSSLVVLHLHNNRIHSLGKKCFDGLHSLETLDLNYNNLDEFPTAIRTLSNLKELGFHSNNIRSIPEKAFVGNPSLITIHFYDNPIQFVGRSAFQHLPELRTLTLNGASQITEFPDLTGTANLESLTLTGAQISSLPQTVCNQLPNLQVLDLSYNLLEDLPSFSVCQKLQKIDLRHNEIYEIKVDTFQQLLSLRSLNLAWNKIAIIHPNAFSTLPSLIKLDLSSNLLSSFPITGLHGLTHLKLTGNHALQSLISSENFPELKVIEMPYAYQCCAFGVCENAYKISNQWNKGDNSSMDDLHKKDAGMFQAQDERDLEDFLLDFEEDLKALHSVQCSPSPGPFKPCEHLLDGWLIRIGVWTIAVLALTCNALVTSTVFRSPLYISPIKLLIGVIAAVNMLTGVSSAVLAGVDAFTFGSFARHGAWWENGVGCHVIGFLSIFASESSVFLLTLAALERGFSVKYSAKFETKAPFSSLKVIILLCALLALTMAAVPLLGGSKYGASPLCLPLPFGEPSTMGYMVALILLNSLCFLMMTIAYTKLYCNLDKGDLENIWDCSMVKHIALLLFTNCILNCPVAFLSFSSLINLTFISPEVIKFILLVVVPLPACLNPLLYILFNPHFKEDLVSLRKQTYVWTRSKHPSLMSINSDDVEKQSCDSTQALVTFTSSSITYDLPPSSVPSPAYPVTESCHLSSVAFVPCL

SEQ ID NO: 423 - DNA, 2970 bp, Homo sapiens
actagagatggcgggcgggctgctctgaagagacctcggcggcggcggaggaggagagaagcgcagcgccgcgccgcgccggggcccatgtggggaggagtcggagtcgctgttgccgccgccgcctgtagctgctggacccgagtgggagtgagggggaaacggcaggatgaagttcgccgagcacctctccgcgcacatcactcccgagtggaggaagcaatacatccagtatgaggctttcaaggatatgctgtattcagctcaggaccaggcaccttctgtggaagttacagatgaggacacagtaaagaggtattttgccaagtttgaagagaagtttttccaaacctgtgaaaaagaacttgccaaaatcaacacattttattcagagaagctcgcagaggctcagcgcaggtttgctacacttcagaatgagcttcagtcatcactggatgcacagaaagaaagcactggtgttactacgctgcgacaacgcagaaagccagtcttccacttgtcccatgaggaacgtgtccaacatagaaatattaaagaccttaaactggccttcagtgagttctacctcagtctaatcctgctgcagaactatcagaatctgaattttacagggtttcgaaaaatcctgaaaaagcatgacaagatcctggaaacatctcgtggagcagattggcgagtggctcacgtagaggtggccccattttatacatgcaagaaaatcaaccagcttatctctgaaactgaggctgtagtgaccaatgaacttgaagatggtgacagacaaaaggctatgaagcgtttacgtgtcccccctttgggagctgctcagcctgcaccagcatggactacttttagagttggcctattttgtggaatattcattgtactgaatattacccttgtgcttgccgctgtatttaaacttgaaacagatagaagtatatggcccttgataagaatctatcggggtggctttcttctgattgaattcctttttctactgggcatcaacacgtatggttggagacaggctggagtaaaccatgtactcatctttgaacttaatccgagaagcaatttgtctcatcaacatctctttgagattgctggattcctcgggatattgtggtgcctgagccttctggcatgcttctttgctccaattagtgtcatccccacatatgtgtatccacttgccctttatggatttatggttttcttccttatcaaccccaccaaaactttctactataaatcccggttttggctgcttaaactgctgtttcgagtatttacagcccccttccataaggtaggctttgctgatttctggctggcggatcagctgaacagcctgtcagtgatactgatggacctggaatatatgatctgcttctacagtttggagctcaaatgggatgaaagtaagggcctgttgccaaataattcagaagaatcaggaatttgccacaaatatacatatggtgtgcgggccattgttcagtgcattcctgcttggcttcgcttcatccagtgcctgcgccgatatcgagacacaaaaagggcctttcctcatttagttaatgctggcaagtactccacaactttcttcatggtggcgtttgcagccctttacagcactcacaaagaacgaggtcactcggacactatggtgttcttttacctgtggattgtcttttatatcatcagttcctgctataccctcatctgggatctcaagatggactggggtctcttcgataagaatgctggagagaacactttcctccgggaagagattgtatacccccaaaaagcctactactactgtgccataatagaggatgtgattctgcgctttgcttggactatccaaatctcgattacctctacaactttgttgcctcattctggggacatcattgctactgtctttgccccacttgaggttttccggcgatttgtgtggaacttcttccgcctggagaatgaacatctgaataactgtggtgaattccgtgctgtgcgggacatctctgtggcccccctgaacgcagatgatcagactctcctagaacagatgatggaccaggatgatggggtacgaaaccgccagaagaatcggtcatggaagtacaaccagagcatatccctgcgccggcctcgcctcgcttctcaatccaaggctcgtgacactaaggtattgatagaagacacagatgatgaagctaacacttgaattttctgaagtctagcttaacatctttggttttcctactctacaatcctttcctcgaccaacgcaacctctagtacctttccagccgaaaacaggagaaaacacataacacattttccgagctcttccggatcggatcctatggactccaaacaagctcactgtgtttcttttcttttcttctggtttaattttaattttctattttcaaaacaagtatttacttcatttgccaatcagaggatgttttaagaaacaaaacatagtatcttatggattgtttacaatcacaaggacatagatacctatcaggatgaagaacaggcattgcaaggaccctctgatgggacggtactgagatatctcggcttccgctcagcccggttttgaatggttgaaaccggacattggtttttaaattttttgtcagtttatgtggagaatttttttctttccttcatacccagcgcaaaggcactggccgcacttgcaggaaaagtgcaacttaaagcagtaccttcattcatgaagctactttttaatttgatgtaacttttcttattttgggaagggttgctgggtgggtgggaaatatgatgtatttgttacacatagttttctcattatttatgaaacttaaccatacagaatgatataactcctgtgcaatgaaggtgataacagtaaaagaaggcaggagaaaaaaaaaa

SEQ ID NO: 424 - protein, 696 aa, Homo sapiens
MKFAEHLSAHITPEWRKQYIQYEAFKDMLYSAQDQAPSVEVTDEDTVKRYFAKFEEKFFQTCEKELAKINTFYSEKLAEAQRRFATLQNELQSSLDAQKESTGVTTLRQRRKPVFHLSHEERVQHRNIKDLKLAFSEFYLSLILLQNYQNLNFTGFRKILKKHDKILETSRGADWRVAHVEVAPFYTCKKINQLISETEAVVTNELEDGDRQKAMKRLRVPPLGAAQPAPAWTTFRVGLFCGIFIVLNITLVLAAVFKLETDRSIWPLIRIYRGGFLLIEFLFLLGINTYGWRQAGVNHVLIFELNPRSNLSHQHLFEIAGFLGILWCLSLLACFFAPISVIPTYVYPLALYGFMVFFLINPTKTFYYKSRFWLLKLLFRVFTAPFHKVGFADFWLADQLNSLSVILMDLEYMICFYSLELKWDESKGLLPNNSEESGICHKYTYGVRAIVQCIPAWLRFIQCLRRYRDTKRAFPHLVNAGKYSTTFFMVAFAALYSTHKERGHSDTMVFFYLWIVFYIISSCYTLIWDLKMDWGLFDKNAGENTFLREEIVYPQKAYYYCAIIEDVILRFAWTIQISITSTTLLPHSGDIIATVFAPLEVFRRFVWNFFRLENEHLNNCGEFRAVRDISVAPLNADDQTLLEQMMDQDDGVRNRQKNRSWKYNQSISLRRPRLASQSKARDTKVLIEDTDDEANT

SEQ ID NO: 425 - DNA, 1892 bp, Homo sapiens
agagatggcagtgagcgagaggagggggctcggccgcgggagccccgcggagtgggggcagcggctacttctggtgctgctgttgggtggctgctccgggcgcatccaccggctggcgctgacgggggagaagcgagcggacatccagctgaacagcttcggtttctacaccaatggctctctggaggtggagttgagcgtcctgcggctgggcctccgggaggcagaagagaagtccctgctggtggggttcagtctcagccgggttcggtctggcagagttcgctcctattcaacccgggatttccaggactgccctctccagaaaaacagtagcagtttcctggtcctgttcctcatcaacaccaaggatctgcaggtccaggtgcggaagtatggagagcagaagacgttgtttatctttcccgggctcctcccggaagcaccctccaaaccagggctcccgaagccacaggccacagtcccccgcaaggtggatggcggagggacctctgcagccagcaagcccaagtcaacacccgcagtgattcagggtcctagtgggaaggacaaggacctggtgttgggcctgagccacctcaacaactcctacaacttcagtttccacgtggtgatcggctctcaggcggaagaaggccagtacagcctgaacttccacaactgcaacaattcagtgccaggaaaggagcatccattcgacatcacggtgatgatccgggagaagaaccccgatggcttcctgtcggcagcggagatgccccttttcaagctctacatggtcatgtccgcctgcttcctggccgctggcatcttctgggtgtccatcctctgcaggaacacgtacagcgtcttcaagatccactggctcatggcggccttggccttcaccaagagcatctctctcctcttccacagcatcaactactacttcatcaacagccagggccaccccatcgaaggccttgccgtcatgtactacatcgcacacctgctgaagggcgccctcctcttcatcaccatcgccctgattggctcaggctgggccttcatcaagtacgtcctgtcggataaggagaagaaggtctttgggatcgtgatccccatgcaggtcctggccaacgtggcctacatcatcatcgagtcccgcgaggaaggcgccagcgactacgtgctgtggaaggagattttgttcctggtggacctcatctgctgtggtgccatcctgttccccgtagtctggtccatccggcatctccaggatgcgtctggcacagacgggaaggtggcagtgaacctggccaagctgaagctgttccggcattactatgtcatggtcatctgctacgtctacttcacccgcatcatcgccatcctgctgcaggtggctgtgccctttcagtggcagtggctgtaccagctcttggtggagggctccaccctggccttcttcgtgctcacgggctacaagttccagcccacagggaacaacccgtacctgcagctgccccaggaggacgaggaggatgttcagatggagcaagtaatgacggactctgggttccgggaaggcctctccaaagtcaacaaaacagccagcgggcgggaactgttatgatcacctccacatctcagaccaaagggtcgtcctcccccagcatttctcactcctgcccttcttccacagcgtatgtggggaggtggagggggtccatgtggaccaggcgcccagctccccgggaccccggttcccggacaagcccatttggaagaagagtcccttcctccccccaaatattgggcagccctgtccttaccccgggaccacccctcccttccagctatgtgtacaataatgaccaatctgtttggct

SEQ ID NO: 426 - protein, 543 aa, Homo sapiens [sequence omitted]

SEQ ID NO: 427 - DNA, 4665 bp, Homo sapiens
agccagcccgaggacgcgagcggcaggtgtgcacagaggttctccactttgttttctgaactcgcggtcaggatggttttctctgtcaggcagtgtggccatgttggcagaactgaagaagttttactgacgttcaagatattccttgtcatcatttgtcttcatgtcgttctggtaacatccctggaagaagatactgataattccagtttgtcaccaccacctgctaaattatctgttgtcagttttgccccctcctccaatgaggttgaaacaacaagcctcaatgatgttactttaagcttactcccttcaaacgaaacagaaaaaactaaaatcactatagtaaaaaccttcaatgcttcaggcgtcaaaccccagagaaatatctgcaatttgtcatctatttgcaatgactcagcattttttagaggtgagatcatgtttcaatatgataaagaaagcactgttccccagaatcaacatataacgaatggcaccttaactggagtcctgtctctaagtgaattaaaacgctcagagctcaacaaaaccctgcaaaccctaagtgagacttactttataatgtgtgctacagcagaggcccaaagcacattaaattgtacattcacaataaaactgaataatacaatgaatgcatgtgctgcaatagccgctttggaaagagtaaagattcgaccaatggaacactgctgctgttctgtcaggataccctgcccttcctccccagaagagttgggaaagcttcagtgtgacctgcaggatcccattgtctgtcttgctgaccatccacgtggcccaccattttcttccagccaatccatcccagtggtgcctcgggccactgtgctttcccaggtccccaaagctacctcttttgctgagcctccagattattcacctgtgacccacaatgttccctctccaataggggagattcaacccctttcaccccagccttcagctcccatagcttccagccctgccattgacatgcccccacagtctgaaacgatctcttcccctatgccccaaacccatgtctccggcaccccacctcctgtgaaagcctcattttcctctcccaccgtgtctgcccctgcgaatgtcaacactaccagcgcacctcctgtccagacagacatcgtcaacaccagcagtatttctgatcttgagaaccaagtgttgcagatggagaaggctctgtccttgggcagcctggagcctaacctcgcaggagaaatgatcaaccaagtcagcagactccttcattccccgcctgacatgctggcccctctggctcaaagattgctgaaagtagtggatgacattggcctacagctgaacttttcaaacacgactataagtctaacctccccttctttggctctggctgtgatcagagtgaatgccagtagtttcaacacaactacctttgtggcccaagaccctgcaaatcttcaggtttctctggaaacccaagctcctgagaacagtattggcacaattactcttccttcatcgctgatgaataatttaccagctcatgacatggagctagcttccagggttcagttcaatttttttgaaacacctgctttgtttcaggatccttccctggagaacctctctctgatcagctacgtcatatcatcgagtgttgcaaacctgaccgtcaggaacttgacaagaaacgtgacagtcacattaaagcacatcaacccgagccaggatgagttaacagtgagatgtgtattttgggacttgggcagaaatggtggcagaggaggctggtcagacaatggctgctctgtcaaagacaggagattgaatgaaaccatctgtacctgtagccatctaacaagcttcggcgttctgctggacctatctaggacatctgtgctgcctgctcaaatgatggctctgacgttcattacatatattggttgtgggctttcatcaatttttctgtcagtgactcttgtaacctacatagcttttgaaaagatccggagggattacccttccaaaatcctcatccagctgtgtgctgctctgcttctgctgaacctggtcttcctcctggactcgtggattgctctgtataagatgcaaggcctctgcatctcagtggctgtatttcttcattattttctcttggtctcattcacatggatgggcctagaagcattccatatgtacctggcccttgtcaaagtatttaatacttacatccgaaaatacatccttaaattctgcattgtcggttggggggtaccagctgtggttgtgaccatcatcctgactatatccccagataactatgggcttggatcctatgggaaattccccaatggttcaccggatgacttctgctggatcaacaacaatgcagtattctacattacggtggtgggatatttctgtgtgatatttttgctgaacgtcagcatgttcattgtggtcctggttcagctctgtcgaattaaaaagaagaagcaactgggagcccagcgaaaaaccagtattcaagacctcaggagtatcgctggccttacatttttactgggaataacttggggctttgccttctttgcctggggaccagttaacgtgaccttcatgtatctgtttgccatctttaataccttacaaggatttttcatattcatcttttactgtgtggccaaagaaaatgtcaggaagcaatggaggcggtatctttgttgtggaaagttacggctggctgaaaattctgactggagtaaaactgctactaatggtttaaagaagcagactgtaaaccaaggagtgtccagctcttcaaattccttacagtcaagcagtaactccactaactccaccacactgctagtgaataatgattgctcagtacacgcaagcgggaatggaaatgcttctacagagaggaatggggtctcttttagtgttcagaatggagatgtgtgccttcacgatttcactggaaaacagcacatgtttaacgagaaggaagattcctgcaatgggaaaggccgtatggctctcagaaggacttcaaagcggggaagcttacactttattgagcaaatgtgattcctttcttctaaaatcaaagcatgatgcttgacagtgtgaaatgtccaattttaccttttacacaatgtgagatgtatgaaaatcaactcattttattctcggcaacatctggagaagcataagctaattaagggcgatgattattattacaagaagaaaccaagacattacaccatggtttttagacatttctgatttggtttcttatctttcattttataagaaggttggttttaaacaatacactaagaatgactcctataaagaaaacaaaaaaaggtagtgaactttcagctaccttttaaagaggctaagttatctttgataacatcatataaagcaactgttgacttcagcctgttggtgagtttagttgtgcatgcctttgttgtatataagctaaattctagtgacccatgtgtcaaaaatcttacttctacatttttttgtatttattttctactgtgtaaatgtattcctttgtagaatcatggttgttttgtctcacgtgataattcagaaaatccttgctcgttccgcaaatcctaaagctccttttggagatgatataggatgtgaaatacagaaacctcagtgaaatcaagaaataatgatcccagccagactgagaaaatgtaagcagacagtgccacagttagctcatacagtgcctttgagcaagttaggaaaagatgcccccactgggcagacacagccctatgggtcatggtttgacaaacagagtgagagaccatattttagccccactcaccctcttgggtgcacgacctgtacagccaaacacagcatccaatatgaatacccatcccctgaccgcatccccagtagtcagattatagaatctgcaccaagatgtttagctttataccttggccacagagagggatgaactgtcatccagaccatgtgtcaggaaaattgtgaacgtagatgaggtacatacactgccgcttctcaaatccccagagcctttaggaacaggagagtagactaggattccttctcttaaaaaggtacatatatatggaaaaaaatcatattgccgttctttaaaaggcaactgcatggtacattgttgattgttatgactggtacactctggcccagccagagctataattgttttttaaatgtgtcttgaagaatgcacagtgacaaggggagtagctattgggaacagggaactgtcctacactgctattgttgctacatgtatcgagccttgattgctcctagttatatacagggtctatcttgcttcctacctacatctgcttgagcagtgcctcaagtacatccttattaggaacatttcaaaccccttttagttaagtctttcactaaggttctcttgcatatatttcaagtgaatgttggatctcagactaaccatagtaataatacacatttctgtgagtgctgacttgtctttgcaatatttcttttctgatttatttaattttcttgtatttatatgttaaaatcaaaaatgttaaaatcaatgaaataaatttgcagttaaga

SEQ ID NO: 428 - protein, 1014 aa, Homo sapiens
MVFSVRQCGHVGRTEEVLLTFKIFLVIICLHVVLVTSLEEDTDNSSLSPPPAKLSVVSFAPSSNEVETTSLNDVTLSLLPSNETEKTKITIVKTFNASGVKPQRNICNLSSICNDSAFFRGEIMFQYDKESTVPQNQHITNGTLTGVLSLSELKRSELNKTLQTLSETYFIMCATAEAQSTLNCTFTIKLNNTMNACAAIAALERVKIRPMEHCCCSVRIPCPSSPEELGKLQCDLQDPIVCLADHPRGPPFSSSQSIPVVPRATVLSQVPKATSFAEPPDYSPVTHNVPSPIGEIQPLSPQPSAPIASSPAIDMPPQSETISSPMPQTHVSGTPPPVKASFSSPTVSAPANVNTTSAPPVQTDIVNTSSISDLENQVLQMEKALSLGSLEPNLAGEMINQVSRLLHSPPDMLAPLAQRLLKVVDDIGLQLNFSNTTISLTSPSLALAVIRVNASSFNTTTFVAQDPANLQVSLETQAPENSIGTITLPSSLMNNLPAHDMELASRVQFNFFETPALFQDPSLENLSLISYVISSSVANLTVRNLTRNVTVTLKHINPSQDELTVRCVFWDLGRNGGRGGWSDNGCSVKDRRLNETICTCSHLTSFGVLLDLSRTSVLPAQMMALTFITYIGCGLSSIFLSVTLVTYIAFEKIRRDYPSKILIQLCAALLLLNLVFLLDSWIALYKMQGLCISVAVFLHYFLLVSFTWMGLEAFHMYLALVKVFNTYIRKYILKFCIVGWGVPAVVVTIILTISPDNYGLGSYGKFPNGSPDDFCWINNNAVFYITVVGYFCVIFLLNVSMFIVVLVQLCRIKKKKQLGAQRKTSIQDLRSIAGLTFLLGITWGFAFFAWGPVNVTFMYLFAIFNTLQGFFIFIFYCVAKENVRKQWRRYLCCGKLRLAENSDWSKTATNGLKKQTVNQGVSSSSNSLQSSSNSTNSTTLLVNNDCSVHASGNGNASTERNGVSFSVQNGDVCLHDFTGKQHMFNEKEDSCNGKGRMALRRTSKRGSLHFIEQM

SEQ ID NO: 429 - DNA, 2686 bp, Homo sapiens
gaacaaacatggccgctctggcgcccgtcggctcccccgcctcccgcggtcctaggctggccgcgggcctccggctgctcccaatgctgggtttgctgcagttgctggccgagcctggcctgggccgcgtccatcacctggcactcaaggatgatgtgaggcataaagttcatctgaacacctttggcttcttcaaggatgggtacatggtggtgaatgtcagtagcctctcactgaatgagcctgaagacaaggatgtgactattggatttagcctagaccgtacaaagaatgatggcttttcttcttacctggatgaagatgtgaattactgtattttaaagaaacagtctgtctctgtcacccttttaatcctagacatctccagaagtgaggtaagagtaaagtctccaccagaagctggtacccagttaccaaagatcatcttcagcagggatgagaaagtccttggtcagagccaggagcctaatgttaaccctgcttcagcaggcaaccagacccagaagacacaagatggtggaaagtctaaaagaagtacagtggattcaaaggccatgggagagaaatccttttctgttcataataatggtggggcagtgtcatttcagtttttctttaacatcagcactgatgaccaagaaggcctttacagtctttattttcataaatgccttggaaaagaattgccaagtgacaagtttacattcagccttgatattgagatcacagagaagaatcctgacagctacctctcagcaggagaaattcctctccccaaattatacatctcaatggcctttttcttctttctttctgggaccatctggattcatatccttcgaaaacgacggaatgatgtatttaaaatccactggctgatggcggcccttcctttcaccaagtctctttccttggtgttccatgcaattgactaccactacatctcctcccagggcttccctatcgaaggctgggctgttgtgtactacataactcaccttttgaaaggggcgctactcttcatcaccattgcactcattggcactggctgggctttcattaagcacatcctttctgataaagacaaaaagatcttcatgattgtcattccactccaggtcctggcaaatgtagcctacatcatcatagagtccaccgaggagggcacgactgaatatggcttgtggaaggactctctatttctggtcgacctgttgtgttgtggtgccatcctcttcccagtggtgtggtcaatcagacatttacaagaagcatcagcaacagatggaaaagctgctattaacttagcaaagctgaaacttttcagacattattacgtcttgattgtgtgttacatatacttcactaggatcattgcatttctcctcaaactcgctgttccattccagtggaagtggctctaccagctcctggatgaaacggccacactggtcttctttgttctaacggggtataaattccgtccggcttcagataacccctacctacaactttctcaggaagaagaagacttggaaatggagtccgttgtgacaacatctggggtgatggaaagtatgaagaaagtcaagaaggtgaccaacggctccgtggagccccagggcgagtgggaaggcgccgtgtgacagagccgaccctgaggatggcactgtccaaggaaactgttaacttattcatagtcctattggacagcaggagcagctcctacagtgaactattggcaccaccgacagtgacaccagggcacatggctggagcacagtgccgcggaaacctgattttgtactctcttttatggaaacgatctgtggctgtttagaggcagctggatcctctttcaggcgggaatgggagggcgggcacagggaggaggagaggaagagaaaaggaagaattcatttttaatttaggtttctttttttcttcttcatttcggagctctaaggtgtatgcagttgtgaccccatgtgtggggaagtgtagcaaggacggctggtggagggggaaggagggtgcgaggtgtctgtctgatgctttaggaaatgtctactgaggaccctgggacttaagaagaagggcggggagagtgccattgcctgtttgggagacaaaaatgaacgaaaacaggtgactttggaaagcaaagtcaaaacccagtttaggatgtagcacctgccccaggattcctgccctcggctttgccccagacccttattccagatgctgagagtgaccaggacagcagctcctgaggcccagtggtcttctttccaacaggaaaagaaggctgtgatgtcgctgtcaggatcatgccctgtggcacagcacaggtggtgggaggtggttttctgactgagatgttgcctgatggatggaaagaaatgtatttttaagttcaaaaagcattatcctgtggcgttgcctggacatccactccctgacagcccagagcagcactgtctggcttcccttcatgcttgtggctttgttgtgtttgatcagaattttgggggaaatggaaagttttcctcaaggagcagctgggggcagaataggtagtatttaagcaaatacttaagtccaagcaaatcatccccattaaaaagcttttcctgtaggctagtaggaaaaaaaaaaaaaaaaa

SEQ ID NO: 430 - protein, 552 aa, Homo sapiens
MAALAPVGSPASRGPRLAAGLRLLPMLGLLQLLAEPGLGRVHHLALKDDVRHKVHLNTFGFFKDGYMVVNVSSLSLNEPEDKDVTIGFSLDRTKNDGFSSYLDEDVNYCILKKQSVSVTLLILDISRSEVRVKSPPEAGTQLPKIIFSRDEKVLGQSQEPNVNPASAGNQTQKTQDGGKSKRSTVDSKAMGEKSFSVHNNGGAVSFQFFFNISTDDQEGLYSLYFHKCLGKELPSDKFTFSLDIEITEKNPDSYLSAGEIPLPKLYISMAFFFFLSGTIWIHILRKRRNDVFKIHWLMAALPFTKSLSLVFHAIDYHYISSQGFPIEGWAVVYYITHLLKGALLFITIALIGTGWAFIKHILSDKDKKIFMIVIPLQVLANVAYIIIESTEEGTTEYGLWKDSLFLVDLLCCGAILFPVVWSIRHLQEASATDGKAAINLAKLKLFRHYYVLIVCYIYFTRIIAFLLKLAVPFQWKWLYQLLDETATLVFFVLTGYKFRPASDNPYLQLSQEEEDLEMESVVTTSGVMESMKKVKKVTNGSVEPQGEWEGAV

SEQ ID NO: 431 - DNA, 1569 bp, Homo sapiens
gagtgagagggagggagcgccggccgcgggagcgggatggaaaccagcagcccgcggcccccgcggcccagctccaacccggggctgagcctggacgcccggctgggcgtggacactcgcctctgggccaaggtgctgttcaccgcgctctacgcactcatctgggcgctgggcgcggcgggcaatgcgctgtccgtgcacgtggtgctgaaggcgcgggccgggcgcgcggggcgcctgcgccaccacgtgctcagcctggcgctcgcgggcctgctgctgctgctggtcggcgtgccggtggagctctacagcttcgtgtggttccactacccctgggtcttcggcgacctgggctgccgcggctactacttcgtgcacgagctgtgcgcctacgccacggtgctgagcgtggcaggcctgagcgccgagcgctgcctagccgtgtgccagcccctgcgtgcccgcagcctgctgacgccacgccggacccggtggctggtggcgctctcgtgggccgcctcgctcggcctcgccctgcccatggccgtcatcatggggcagaagcacgaactcgagacggcggacggggagccggagcccgcctcgcgagtgtgcacggtgctggtgagccgcaccgcgctccaagtctttatccaggtgaatgtgctggtgtccttcgtgctccccttggcactaactgctttcctgaatggggtcacagtgagccacctgctggccctctgctcccaagtgccgtccacttctaccccgggcagctccacccccagccgcctggagctgctgagtgaggagggtctcctcagcttcatcgtatggaagaagacctttatccagggaggccaggtcagcctggtgagacataaagacgtgcgccggatccgcagcctccagcgcagcgtccaggttctcagagccatcgtggtcatgtatgtcatctgctggctgccgtaccatgcccgcaggctcatgtactgctacgtacctgatgacgcgtggactgacccactgtacaatttctaccactacttctacatggtgaccaacacacttttctacgtcagctcagctgtgactcctcttctctacaacgccgtgtcctcctccttcagaaaactcttcctggaagccgtcagctccctgtgtggagagcaccaccccatgaagcggttacccccgaagccccagagtcccaccctaatggatacagcttcaggctttggggatcccccagaaacccggacctgaatgtaatgcaagaatgaacagaacaagcaaaatgaccagctgcttagtcacctggcaaagcaggtgagcaacctcatcactaatcattcaagcttcgcagccagggcgacttctatcaacccctgctctgctgagaaccatcaagcgcagggaagccacgtgacccctcctagcctcaggctccctcgtctgtgtagtggagataaagaacagcacccatctcttagtgttgcctgagactaaagtgcttagcacagaacctggtgcgtagtagatgctcaataaatttttgctggcacg

SEQ ID NO: 432 - protein, 410 aa, Homo sapiens
METSSPRPPRPSSNPGLSLDARLGVDTRLWAKVLFTALYALIWALGAAGNALSVHVVLKARAGRAGRLRHHVLSLALAGLLLLLVGVPVELYSFVWFHYPWVFGDLGCRGYYFVHELCAYATVLSVAGLSAERCLAVCQPLRARSLLTPRRTRWLVALSWAASLGLALPMAVIMGQKHELETADGEPEPASRVCTVLVSRTALQVFIQVNVLVSFVLPLALTAFLNGVTVSHLLALCSQVPSTSTPGSSTPSRLELLSEEGLLSFIVWKKTFIQGGQVSLVRHKDVRRIRSLQRSVQVLRAIVVMYVICWLPYHARRLMYCYVPDDAWTDPLYNFYHYFYMVTNTLFYVSSAVTPLLYNAVSSSFRKLFLEAVSSLCGEHHPMKRLPPKPQSPTLMDTASGFGDPPETRT

SEQ ID NO: 433 - DNA, 3136 bp, Homo sapiens
cagagaggctgtatttcagtgcagcctgccagacctcttctggaggaagactggacaaagggggtcacacattccttccatacggttgagcctctacctgcctggtgctggtcacagttcagcttcttcatgatggtggatcccaatggcaatgaatccagtgctacatacttcatcctaataggcctccctggtttagaagaggctcagttctggttggccttcccattgtgctccctctaccttattgctgtgctaggtaacttgacaatcatctacattgtgcggactgagcacagcctgcatgagcccatgtatatatttctttgcatgctttcaggcattgacatcctcatctccacctcatccatgcccaaaatgctggccatcttctggttcaattccactaccatccagtttgatgcttgtctgctacagatttttgccatccactccttatctggcatggaatccacagtgctgctggccatggcttttgaccgctatgtggccatctgtcacccactgcgccatgccacagtacttacgttgcctcgtgtcaccaaaattggtgtggctgctgtggtgcggggggctgcactgatggcaccccttcctgtcttcatcaagcagctgcccttctgccgctccaatatcctttcccattcctactgcctacaccaagatgtcatgaagctggcctgtgatgatatccgggtcaatgtcgtctatggccttatcgtcatcatctccgccattggcctggactcacttctcatctccttctcatatctgcttattcttaagactgtgttgggcttgacacgtgaagcccaggccaaggcatttggcacttgcgtctctcatgtgtgtgctgtgttcatattctatgtacctttcattggattgtccatggtgcatcgctttagcaagcggcgtgactctccgctgcccgtcatcttggccaatatctatctgctggttcctcctgtgctcaacccaattgtctatggagtgaagacaaaggagattcgacagcgcatccttcgacttttccatgtggccacacacgcttcagagccctaggtgtcagtgatcaaacttcttttccattcagagtcctctgattcagattttaatgttaacattttggaagacagtattcagaaaaaaaatttccttaataaaaaatacaactcagatccttcaaatatgaaactggttggggaatctccattttttcaatattattttcttctttgttttcttgctacatataattattaataccctgactaggttgtggttggagggttattacttttcattttaccatgcagtccaaatctaaactgcttctactgatggtttacagcattctgagataagaatggtacatctagagaacatttgccaaaggcctaagcacggcaaaggaaaataaacacagaatataataaaatgagataatctagcttaaaactataacttcctcttcagaactcccaaccacattggatctcagaaaaatgctgtcttcaaaatgacttctacagagaagaaataatttttcctctggacactagcacttaaggggaagattggaagtaaagccttgaaaagagtacatttacctacgttaatgaaagttgacacactgttctgagagttttcacagcatatggaccctgtttttcctatttaattttcttatcaaccctttaattaggcaaagatattattagtaccctcattgtagccatgggaaaattgatgttcagtggggatcagtgaattaaatggggtcatacaagtataaaaattaaaaaaaaaaaagacttcatgcccaatctcatatgatgtggaagaactgttagagagaccaacagggtagtgggttagagatttccagagtcttacattttctagaggaggtatttaatttcttctcactcatccagtgttgtatttaggaatttcctggcaacagaactcatggctttaatcccactagctattgcttattgtcctggtccaattgccaattacctgtgtcttggaagaagtgatttctaggttcaccattatggaagattcttattcagaaagtctgcatagggcttatagcaagttatttatttttaaaagttccataggtgattctgataggcagtgaggttagggagccaccagttatgatgggaagtatggaatggcaggtcttgaagataacattggccttttgagtgtgactcgtagctggaaagtgagggaatcttcaggaccatgctttatttggggctttgtgcagtatggaacagggactttgagaccaggaaagcaatctgacttaggcatgggaatcaggcatttttgcttctgaggggctattaccaagggttaataggtttcatcttcaacaggatatgacaacagtgttaaccaagaaactcaaattacaaatactaaaacatgtgatcatatatgtggtaagtttcattttctttttcaatcctcaggttccctgatatggattcctataacatgctttcatccccttttgtaatggatatcatatttggaaatgcctatttaatacttgtatttgctgctggactgtaagcccatgagggcactgtttattattgaatgtcatctctgttcatcattgactgctctttgctcatcattgaatcccccagcaaagtgcctagaacataatagtgcttatgcttgacaccggttatttttcatcaaacctgattccttctgtcctgaacacatagccaggcaattttccagccttctttgagttgggtattattaaattctggccattacttccaatgtgagtggaagtgacatgtgcaatttctatacctggctcataaaaccctcccatgtgcagcctttcatgttgacattaaatgtgacttgggaagctatgtgttacacagagtaaatcaccagaagcctggatttctgaaaaaactgtgcagagccaaacctctgtcatttgcaactcccacttgtatttgtacgaggcagttggataagtgaaaaataaagtactattgtgtcaagaaaaaaaaaaaaaaaaaaaaaaaaaaaaaaaaaaaaaaaaaaaaaaaaaaaa

SEQ ID NO: 434 - protein, 318 aa, Homo sapiens
MMVDPNGNESSATYFILIGLPGLEEAQFWLAFPLCSLYLIAVLGNLTIIYIVRTEHSLHEPMYIFLCMLSGIDILISTSSMPKMLAIFWFNSTTIQFDACLLQMFAIHSLSGMESTVLLAMAFDRYVAICHPLRHATVLTLPRVTKIGVAAVVRGAALMAPLPVFIKQLPFCRSNILSHSYCLHQDVMKLACDDIRVNVVYGLIVIISAIGLDSLLISFSYLLILKTVLGLTREAQAKAFGTCVSHVCAVFIFYVPFIGLSMVHRFSKRRDSPLPVILANIYLLVPPVLNPIVYGVKTKEIRQRILRLFHVATHASEP

SEQ ID NO: 435 - DNA, 2826 bp, Homo sapiens
atggcttccccgcggaggtccgggcagccagggcggccgccgccgccgccaccgccgcccgcgcgcctgctactgctactgctgctgccgctgctgctgcctctggcgcccggggcctggggctgggcgcggggcgccccccggccgccgcccagcagcccgccgctctccatcatgggcctcatgccgctcaccaaggaggtggccaagggcagcatcgggcgcggtgtgctccccgccgtggaactggccatcgagcagatccgcaacgagtcactcctgcgcccctacttcctcgacctgcggctctatgacacggagtgcgacaacgcaaaagggttgaaagccttctacgatgcaataaaatacgggccgaaccacttgatggtgtttggaggcgtctgtccatccgtcacatccatcattgcagagtccctccaaggctggaatctggtgcagctttcttttgctgcaaccacgcctgttctagccgataagaaaaaatacccttatttctttcggaccgtcccatcagacaatgcggtgaatccagccattctgaagttgctcaagcactaccagtggaagcgcgtgggcacgctgacgcaagacgttcagaggttctctgaggtgcggaatgacctgactggagttctgtatggcgaggacattgagatttcagacaccgagagcttctccaacgatccctgtaccagtgtcaaaaagctgaaggggaatgatgtgcggatcatccttggccagtttgaccagaatatggcagcaaaagtgttctgttgtgcatacgaggagaacatgtatggtagtaaatatcagtggatcattccgggctggtacgagccttcttggtgggagcaggtgcacacggaagccaactcatcccgctgcctccggaagaatctgcttgctgccatggagggctacattggcgtggatttcgagcccctgagctccaagcagatcaagaccatctcaggaaagactccacagcagtatgagagagagtacaacaacaagcggtcaggcgtggggcccagcaagttccacgggtacgcctacgatggcatctgggtcatcgccaagacactgcagagggccatggagacactgcatgccagcagccggcaccagcggatccaggacttcaactacacggaccacacgctgggcaggatcatcctcaatgccatgaacgagaccaacttcttcggggtcacgggtcaagttgtattccggaatggggagagaatggggaccattaaatttactcaatttcaagacagcagggaggtgaaggtgggagagtacaacgctgtggccgacacactggagatcatcaatgacaccatcaggttccaaggatccgaaccaccaaaagacaagaccatcatcctggagcagctgcggaagatctccctacctctctacagcatcctctctgccctcaccatcctcgggatgatcatggccagtgcttttctcttcttcaacatcaagaaccggaatcagaagctcataaagatgtcgagtccatacatgaacaaccttatcatccttggagggatgctctcctatgcttccatatttctctttggccttgatggatcctttgtctctgaaaagacctttgaaacactttgcaccgtcaggacctggattctcaccgtgggctacacgaccgcttttggggccatgtttgcaaagacctggagagtccacgccatcttcaaaaatgtgaaaatgaagaagaagatcatcaaggaccagaaactgcttgtgatcgtggggggcatgctgctgatcgacctgtgtatcctgatctgctggcaggctgtggaccccctgcgaaggacagtggagaagtacagcatggagccggacccagcaggacgggatatctccatccgccctctcctggagcactgtgagaacacccatatgaccatctggcttggcatcgtctatgcctacaagggacttctcatgttgttcggttgtttcttagcttgggagacccgcaacgtcagcatccccgcactcaacgacagcaagtacatcgggatgagtgtctacaacgtggggatcatgtgcatcatcggggccgctgtctccttcctgacccgggaccagcccaatgtgcagttctgcatcgtggctctggtcatcatcttctgcagcaccatcaccctctgcctggtattcgtgccgaagctcatcaccctgagaacaaacccagatgcagcaacgcagaacaggcgattccagttcactcagaatcagaagaaagaagattctaaaacgtccacctcggtcaccagtgtgaaccaagccagcacatcccgcctggagggcctacagtcagaaaaccatcgcctgcgaatgaagatcacagagctggataaagacttggaagaggtcaccatgcagctgcaggacacaccagaaaagaccacctacattaaacagaaccactaccaagagctcaatgacatcctcaacctgggaaacttcactgagagcacagatggaggaaaggccattttaaaaaatcacctcgatcaaaatccccagctacagtggaacacaacagagccctctcgaacatgcaaagatcctatagaagatataaactctccagaacacatccagcgtcggctgtccctccagctccccatcctccaccacgcctacctcccatccatcggaggcgtggacgccagctgtgtcagcccctgcgtcagccccaccgccagcccccgccacagacatgtgccaccctccttccgagtcatggtctcgggcctgtaa

SEQ ID NO: 436 - protein, 941 aa, Homo sapiens
MASPRRSGQPGRPPPPPPPPARLLLLLLLPLLLPLAPGAWGWARGAPRPPPSSPPLSIMGLMPLTKEVAKGSIGRGVLPAVELAIEQIRNESLLRPYFLDLRLYDTECDNAKGLKAFYDAIKYGPNHLMVFGGVCPSVTSIIAESLQGWNLVQLSFAATTPVLADKKKYPYFFRTVPSDNAVNPAILKLLKHYQWKRVGTLTQDVQRFSEVRNDLTGVLYGEDIEISDTESFSNDPCTSVKKLKGNDVRIILGQFDQNMAAKVFCCAYEENMYGSKYQWIIPGWYEPSWWEQVHTEANSSRCLRKNLLAAMEGYIGVDFEPLSSKQIKTISGKTPQQYEREYNNKRSGVGPSKFHGYAYDGIWVIAKTLQRAMETLHASSRHQRIQDFNYTDHTLGRIILNAMNETNFFGVTGQVVFRNGERMGTIKFTQFQDSREVKVGEYNAVADTLEIINDTIRFQGSEPPKDKTIILEQLRKISLPLYSILSALTILGMIMASAFLFFNIKNRNQKLIKMSSPYMNNLIILGGMLSYASIFLFGLDGSFVSEKTFETLCTVRTWILTVGYTTAFGAMFAKTWRVHAIFKNVKMKKKIIKDQKLLVIVGGMLLIDLCILICWQAVDPLRRTVEKYSMEPDPAGRDISIRPLLEHCENTHMTIWLGIVYAYKGLLMLFGCFLAWETRNVSIPALNDSKYIGMSVYNVGIMCIIGAAVSFLTRDQPNVQFCIVALVIIFCSTITLCLVFVPKLITLRTNPDAATQNRRFQFTQNQKKEDSKTSTSVTSVNQASTSRLEGLQSENHRLRMKITELDKDLEEVTMQLQDTPEKTTYIKQNHYQELNDILNLGNFTESTDGGKAILKNHLDQNPQLQWNTTEPSRTCKDPIEDINSPEHIQRRLSLQLPILHHAYLPSIGGVDASCVSPCVSPTASPRHRHVPPSFRVMVSGL

SEQ ID NO: 437 - DNA, 2539 bp, Homo sapiens
gtgaaatttaaactccagtcctgtggcgaaaatgctaattgcactaacacagaaggaagttattattgtatgtgtgtacctggcttcagatccagcagtaaccaagacaggtttatcactaatgatggaaccgtctgtatagaaaatgtgaatgcaaactgccatttagataatgtctgtatagctgcaaatattaataaaactttaacaaaaatcagatccataaaagaacctgtggctttgctacaagaagtctatagaaattctgtgacagatctttcaccaacagatataattacatatatagaaatattagctgaatcatcttcattactaggttacaagaacaacactatctcagccaaggacaccctttctaactcaactcttactgaatttgtaaaaaccgtgaataattttgttcaaagggatacatttgtagtttgggacaagttatctgtgaatcataggagaacacatcttacaaaactcatgcacactgttgaacaagctactttaaggatatcccagagcttccaaaagaccacagagtttgatacaaattcaacggatatagctctcaaagttttcttttttgattcatataacatgaaacatattcatcctcatatgaatatggatggagactacataaatatatttccaaagagaaaagctgcatatgattcaaatggcaatgttgcagttgcatttttatattataagagtattggtcctttgctttcatcatctgacaacttcttattgaaacctcaaaattatgataattctgaagaggaggaaagagtcatatcttcagtaatttcagtctcaatgagctcaaacccacccacattatatgaacttgaaaaaataacatttacattaagtcatcgaaaggtcacagataggtataggagtctatgtgcattttggaattactcacctgataccatgaatggcagctggtcttcagagggctgtgagctgacatactcaaatgagacccacacctcatgccgctgtaatcacctgacacattttgcaattttgatgtcctctggtccttccattggtattaaagattataatattcttacaaggatcactcaactaggaataattatttcactgatttgtcttgccatatgcatttttaccttctggttcttcagtgaaattcaaagcaccaggacaacaattcacaaaaatctttgctgtagcctatttcttgctgaacttgtttttcttgttgggatcaatacaaatactaataagctcttctgttcaatcattgccggactgctacactacttctttttagctgcttttgcatggatgtgcattgaaggcatacatctctatctcattgttgtgggtgtcatctacaacaagggatttttgcacaagaatttttatatctttggctatctaagcccagccgtggtagttggattttcggcagcactaggatacagatattatggcacaaccaaagtatgttggcttagcaccgaaaacaactttatttggagttttataggaccagcatgcctaatcattcttgttaatctcttggcttttggagtcatcatatacaaagtttttcgtcacactgcagggttgaaaccagaagttagttgctttgagaacataaggtcttgtgcaagaggagccctcgctcttctgttccttctcggcaccacctggatctttggggttctccatgttgtgcacgcatcagtggttacagcttacctcttcacagtcagcaatgctttccaggggatgttcatttttttattcctgtgtgttttatctagaaagattcaagaagaatattacagattgttcaaaaatgtcccctgttgttttggatgtttaaggtaaacatagagaatggtggataattacaactgcacaaaaataaaaattccaagctgtggatgaccaatgtataaaaatgactcatcaaattatccaattattaactactagacaaaaagtattttaaatcagtttttctgtttatgctataggaactgtagataataaggtaaaattatgtatcatatagatatactatgtttttctatgtgaaatagttctgtcaaaaatagtattgcagatatttggaaagtaattggtttctcaggagtgatatcactgcacccaaggaaagattttctttctaacacgagaagtatatgaatgtcctgaaggaaaccactggcttgatatttctgtgactcgtgttgcctttgaaactagtcccctaccacctcggtaatgagctccattacagaaagtggaacataagagaatgaaggggcagaatatcaaacagtgaaaagggaatgataagatgtattttgaatgaactgttttttctgtagactagctgagaaattgttgacataaaataaagaattgaagaaacacattttaccattttgtgaattgttctgaacttaaatgtccactaaaacaacttagacttctgtttgctaaatctgtttctttttctaatattctaaaa

SEQ ID NO: 438 - protein, 606 aa, Homo sapiens
MCVPGFRSSSNQDRFITNDGTVCIENVNANCHLDNVCIAANINKTLTKIRSIKEPVALLQEVYRNSVTDLSPTDIITYIEILAESSSLLGYKNNTISAKDTLSNSTLTEFVKTVNNFVQRDTFVVWDKLSVNHRRTHLTKLMHTVEQATLRISQSFQKTTEFDTNSTDIALKVFFFDSYNMKHIHPHMNMDGDYINIFPKRKAAYDSNGNVAVAFLYYKSIGPLLSSSDNFLLKPQNYDNSEEEERVISSVISVSMSSNPPTLYELEKITFTLSHRKVTDRYRSLCAFWNYSPDTMNGSWSSEGCELTYSNETHTSCRCNHLTHFAILMSSGPSIGIKDYNILTRITQLGIIISLICLAICIFTFWFFSEIQSTRTTIHKNLCCSLFLAELVFLVGINTNTNKLFCSIIAGLLHYFFLAAFAWMCIEGIHLYLIVVGVIYNKGFLHKNFYIFGYLSPAVVVGFSAALGYRYYGTTKVCWLSTENNFIWSFIGPACLIILVNLLAFGVIIYKVFRHTAGLKPEVSCFENIRSCARGALALLFLLGTTWIFGVLHVVHASVVTAYLFTVSNAFQGMFIFLFLCVLSRKIQEEYYRLFKNVPCCFGCLR

SEQ ID NO: 439 - DNA, 1773 bp, Homo sapiens
atgaccttgcacaataacagtacaacctcgcctttgtttccaaacatcagctcctcctggatacacagcccctccgatgcagggctgcccccgggaaccgtcactcatttcggcagctacaatgtttctcgagcagctggcaatttctcctctccagacggtaccaccgatgaccctctgggaggtcataccgtctggcaagtggtcttcatcgctttcttaacgggcatcctggccttggtgaccatcatcggcaacatcctggtaattgtgtcatttaaggtcaacaagcagctgaagacggtcaacaactacttcctcttaagcctggcctgtgccgatctgattatcggggtcatttcaatgaatctgtttacgacctacatcatcatgaatcgatgggccttagggaacttggcctgtgacctctggcttgccattgactacgtagccagcaatgcctctgttatgaatcttctggtcatcagctttgacagatacttttccatcacgaggccgctcacgtaccgagccaaacgaacaacaaagagagccggtgtgatgatcggtctggcttgggtcatctcctttgtcctttgggctcctgccatcttgttctggcaatactttgttggaaagagaactgtgcctccgggagagtgcttcattcagttcctcagtgagcccaccattacttttggcacagccatcgctgctttttatatgcctgtcaccattatgactattttatactggaggatctataaggaaactgaaaagcgtaccaaagagcttgctggcctgcaagcctctgggacagaggcagagacagaaaactttgtccaccccacgggcagttctcgaagctgcagcagttacgaacttcaacagcaaagcatgaaacgctccaacaggaggaagtatggccgctgccacttctggttcacaaccaagagctggaaacccagctccgagcagatggaccaagaccacagcagcagtgacagttggaacaacaatgatgctgctgcctccctggagaactccgcctcctccgacgaggaggacattggctccgagacgagagccatctactccatcgtgctcaagcttccgggtcacagcaccatcctcaactccaccaagttaccctcatcggacaacctgcaggtgcctgaggaggagctggggatggtggacttggagaggaaagccgacaagctgcaggcccagaagagcgtggacgatggaggcagttttccaaaaagcttctccaagcttcccatccagctagagtcagccgtggacacagctaagacttctgacgtcaactcctcagtgggtaagagcacggccactctacctctgtccttcaaggaagccactctggccaagaggtttgctctgaagaccagaagtcagatcactaagcggaaaaggatgtccctggtcaaggagaagaaagcggcccagaccctcagtgcgatcttgcttgccttcatcatcacttggaccccatacaacatcatggttctggtgaacaccttttgtgacagctgcatacccaaaaccttttggaatctgggctactggctgtgctacatcaacagcaccgtgaaccccgtgtgctatgctctgtgcaacaaaacattcagaaccactttcaagatgctgctgctgtgccagtgtgacaaaaaaaagaggcgcaagcagcagtaccagcagagacagtcggtcatttttcacaagcgcgcacccgagcaggccttgtag

SEQ ID NO: 440 - protein, 590 aa, Homo sapiens
MTLHNNSTTSPLFPNISSSWIHSPSDAGLPPGTVTHFGSYNVSRAAGNFSSPDGTTDDPLGGHTVWQVVFIAFLTGILALVTIIGNILVIVSFKVNKQLKTVNNYFLLSLACADLIIGVISMNLFTTYIIMNRWALGNLACDLWLAIDYVASNASVMNLLVISFDRYFSITRPLTYRAKRTTKRAGVMIGLAWVISFVLWAPAILFWQYFVGKRTVPPGECFIQFLSEPTITFGTAIAAFYMPVTIMTILYWRIYKETEKRTKELAGLQASGTEAETENFVHPTGSSRSCSSYELQQQSMKRSNRRKYGRCHFWFTTKSWKPSSEQMDQDHSSSDSWNNNDAAASLENSASSDEEDIGSETRAIYSIVLKLPGHSTILNSTKLPSSDNLQVPEEELGMVDLERKADKLQAQKSVDDGGSFPKSFSKLPIQLESAVDTAKTSDVNSSVGKSTATLPLSFKEATLAKRFALKTRSQITKRKRMSLVKEKKAAQTLSAILLAFIITWTPYNIMVLVNTFCDSCIPKTFWNLGYWLCYINSTVNPVCYALCNKTFRTTFKMLLLCQCDKKKRRKQQYQQRQSVIFHKRAPEQAL

SEQ ID NO: 441 - DNA, 2799 bp, Homo sapiens
gaaactggccctggccctgaaccaaataccttgaaccctcgtaaactccataccctgacccccttgttttggatatacccaggtagaacaactctctctcactgtctgttgtgaggatacgctgtagcccactcattaagtacattctcctaataaatgctttggactgatcaccctgccagtcttttgtcttgggcaatctatacttttctcagaggttcccaaggcctactgaagggacttaacatactcttaatggctttcctctctcttgttttaccttatgccctcacttcctgagttaacctcccaaatacaggatcacctgtacccaagcccttagctcaagaatacaggatcacctgtacccaagcccttagctcaagctctgctttggaagaacccaaactaagacagtgctcctggtgccctccccaagcaacctcaagttctggctgttacttgagcagaggcctttcttttcccttcccccagctctatccatctgccaggcccccctcaaatctcttcatttccaagttttgcttgacttttccaagaggagagggctgcttcttagtatgtccctactcatcctttcctttcttgtcttgtatcctggtgcagcctggtaatggggcctcttcatggttgtgtgtcatgactccctaaccattatgcctccatgcatcccctgttcctcctggaacctagcaccatgccttacatggaaaagctgtcattgacagcccggtgagagccctgagggtggagtgactggggcagggcctgaggcaagaggtgggaggaggtaggaggccaggggctcagccggaccaggagactggaaacaggcaaggataaggcaggtgggggactgagttgtttgggtcacctctgcaggccagagagaccaggcaacatacacactgcagaaggtgggctgggaggattggggccagagctgggggagggatgagaacagaagcaggaccaggattcagcagagtcctcctatttccttccaccaccagggaatcttactgccccacttcagcttgtgctgtttcctggcaaggcaggctctcacatgcctggacgcctgggtgcgttggtgatgggaaggagcagggtgagggaggggccccaggagaggcccaggatgagcctcatcttgtccctccccattcttgtcttaccctctgcaaatgtgataggcacaggacaggagtaggcacctcgcctactgctgcttaacctttcagcttctccaggcccccaatcctgcttgctcccagcttggtaagtagatctgtgcacgtccctttacaccccaccatccagttttgcccagatgtgctagaatggggctggacaaagaaggaggggccagactagaggagtggtggtagagatagtgacagcctggggtgaggactttatgcctgtttaccactgagctctgggaaggaggccaggagtggggcaggtcaactgactgggagcaggggatctgggttccaagaaggagttgtgtttgaggtggggtctgggtcctcgtggaagtcaggactcccaggcagaaaagaggcaggctgcagggaagtaaggaggaggcatggcaccttctcatcgggcatcacaggtggggttttgccccacccctgaacgccctctgtggcgccttccacccacctgtaggcccagaaggatgtcggtctgctaccgtcccccagggaacgagacactgctgagctggaagacttcgcgggccacaggcacagccttcctgctgctggcggcgctgctggggctgcctggcaacggcttcgtggtgtggagcttggcgggctggcggcctgcacgggggcgaccgctggcggccacgcttgtgctgcacctggcgctggccgacggcgcggtgctgctgctcacgccgctctttgtggccttcctgacccggcaggcctggccgctgggccaggcgggctgcaaggcggtgtactacgtgtgcgcgctcagcatgtacgccagcgtgctgctcaccggcctgctcagcctgcagcgctgcctcgcagtcacccgccccttcctggcgcctcggctgcgcagcccggccctggcccgccgcctgctgctggcggtctggctggccgccctgttgctcgccgtcccggccgccgtctaccgccacctgtggagggaccgcgtatgccagctgtgccacccgtcgccggtccacgccgccgcccacctgagcctggagactctgaccgctttcgtgcttcctttcgggctgatgctcggctgctacagcgtgacgctggcacggctgcggggcgcccgctggggctccgggcggcacggggcgcgggtgggccggctggtgagcgccatcgtgcttgccttcggcttgctctgggccccctaccacgcagtcaaccttctgcaggcggtcgcagcgctggctccaccggaaggggccttggcgaagctgggcggagccggccaggcggcgcgagcgggaactacggccttggccttcttcagttctagcgtcaacccggtgctctacgtcttcaccgctggagatctgctgccccgggcaggtccccgtttcctcacgcggctcttcgaaggctctggggaggcccgagggggcggccgctctagggaagggaccatggagctccgaactacccctcagctgaaagtggtggggcagggccgcggcaatggagacccggggggtgggatggagaaggacggtccggaatgggacctttgacagcagaccct

SEQ ID NO: 442 - protein, 389 aa, Homo sapiens
MAPSHRASQVGFCPTPERPLWRLPPTCRPRRMSVCYRPPGNETLLSWKTSRATGTAFLLLAALLGLPGNGFVVWSLAGWRPARGRPLAATLVLHLALADGAVLLLTPLFVAFLTRQAWPLGQAGCKAVYYVCALSMYASVLLTGLLSLQRCLAVTRPFLAPRLRSPALARRLLLAVWLAALLLAVPAAVYRHLWRDRVCQLCHPSPVHAAAHLSLETLTAFVLPFGLMLGCYSVTLARLRGARWGSGRHGARVGRLVSAIVLAFGLLWAPYHAVNLLQAVAALAPPEGALAKLGGAGQAARAGTTALAFFSSSVNPVLYVFTAGDLLPRAGPRFLTRLFEGSGEARGGGRSREGTMELRTTPQLKVVGQGRGNGDPGGGMEKDGPEWDL

SEQ ID NO: 443 - DNA, 11389 bp, Homo sapiens
atggcgccgccgccgccgcccgtgctgcccgtgctgctgctcctggccgccgccgccgccctgccggcgatggggctgcgagcggccgcctgggagccgcgcgtacccggcgggacccgcgccttcgccctccggcccggctgtacctacgcggtgggcgccgcttgcacgccccgggcgccgcgggagctgctggacgtgggccgcgatgggcggctggcaggacgtcggcgcgtctcgggcgcggggcgcccgctgccgctgcaagtccgcttggtggcccgcagtgccccgacggcgctgagccgccgcctgcgggcgcgcacgcaccttcccggctgcggagcccgtgcccggctctgcggaaccggtgcccggctctgcggggcgctctgcttccccgtccccggcggctgcgcggccgcgcagcattcggcgctcgcagctccgaccaccttacccgcctgccgctgcccgccgcgccccaggccccgctgtcccggccgtcccatctgcctgccgccgggcggctcggtccgcctgcgtctgctgtgcgccctgcggcgcgcggctggcgccgtccgggtgggactggcgctggaggccgccaccgcggggacgccctccgcgtcgccatccccatcgccgcccctgccgccgaacttgcccgaagcccgggcggggccggcgcgacgggcccggcggggcacgagcggcagagggagcctgaagtttccgatgcccaactaccaggtggcgttgtttgagaacgaaccggcgggcaccctcatcctccagctgcacgcgcactacaccatcgagggcgaggaggagcgcgtgagctattacatggaggggctgttcgacgagcgctcccggggctacttccgaatcgactctgccacgggcgccgtgagcacggacagcgtactggaccgcgagaccaaggagacgcacgtcctcagggtgaaagccgtggactacagtacgccgccgcgctcggccaccacctacatcactgtcttggtcaaagacaccaacgaccacagcccggtcttcgagcagtcggagtaccgcgagcgcgtgcgggagaacctggaggtgggctacgaggtgctgaccatccgcgccagcgaccgcgactcgcccatcaacgccaacttgcgttaccgcgtgttggggggcgcgtgggacgtcttccagctcaacgagagctctggcgtggtgagcacacgggcggtgctggaccgggaggaggcggccgagtaccagctcctggtggaggccaacgaccaggggcgcaatccgggcccgctcagtgccacggccaccgtgtacatcgaggtggaggacgagaacgacaactacccccagttcagcgagcagaactacgtggtccaggtgcccgaggacgtggggctcaacacggctgtgctgcgagtgcaggccacggaccgggaccagggccagaacgcggccattcactacagcatcctcagcgggaacgtggccggccagttctacctgcactcgctgagcgggatcctggatgtgatcaaccccttggatttcgaggatgtccagaaatactcgctgagcattaaggcccaggatgggggccggcccccgctcatcaattcttcaggggtggtgtctgtgcaggtgctggatgtcaacgacaacgagcctatctttgtgagcagccccttccaggccacggtgctggagaatgtgcccctgggctaccccgtggtgcacattcaggcggtggacgcggactctggagagaacgcccggctgcactatcgcctggtggacacggcctccacctttctggggggcggcagcgctgggcctaagaatcctgcccccacccctgacttccccttccagatccacaacagctccggttggatcacagtgtgtgccgagctggaccgcgaggaggtggagcactacagcttcggggtggaggcggtggaccacggctcgccccccatgagctcctccaccagcgtgtccatcacggtgctggacgtgaatgacaacgacccggtgttcacgcagcccacctacgagcttcgtctgaatgaggatgcggccgtggggagcagcgtgctgaccctgcaggcccgcgaccgtgacgccaacagtgtgattacctaccagctcacaggcggcaacacccggaaccgctttgcactcagcagccagagagggggcggcctcatcaccctggcgctacctctggactacaagcaggagcagcagtacgtgctggcggtgacagcatccgacggcacacggtcgcacactgcgcatgtcctaatcaacgtcactgatgccaacacccacaggcctgtctttcagagctcccattacacagtgagtgtcagtgaggacaggcctgtgggcacctccattgctaccctcagtgccaacgatgaggacacaggagagaatgcccgcatcacctacgtgattcaggaccccgtgccgcagttccgcattgaccccgacagtggcaccatgtacaccatgatggagctggactatgagaaccaggtcgcctacacgctgaccatcatggcccaggacaacggcatcccgcagaaatcagacaccaccaccctagagatcctcatcctcgatgccaatgacaatgcaccccagttcctgtgggatttctaccagggttccatctttgaggatgctccaccctcgaccagcatcctccaggtctctgccacggaccgggactcaggtcccaatgggcgtctgctgtacaccttccagggtggggacgacggcgatggggacttctacatcgagcccacgtccggtgtgattcgcacccagcgccggctggaccgggagaatgtggccgtgtacaacctttgggctctggctgtggatcggggcagtcccactccccttagcgcctcggtagaaatccaggtgaccatcttggacattaatgacaatgcccccatgtttgagaaggacgaactggagctgtttgttgaggagaacaacccagtggggtcggtggtggcaaagattcgtgctaacgaccctgatgaaggccctaatgcccagatcatgtatcagattgtggaaggggacatgcggcatttcttccagctggacctgctcaacggggacctgcgtgccatggtggagctggactttgaggtccggcgggagtatgtgctggtggtgcaggccacgtcggctccgctggtgagccgagccacggtgcacatccttctcgtggaccagaatgacaacccgcctgtgctgcccgacttccagatcctcttcaacaactatgtcaccaacaagtccaacagtttccccaccggcgtgatcggctgcatcccggcccatgaccccgacgtgtcagacagcctcaactacaccttcgtgcagggcaacgagctgcgcctgttgctgctggaccccgccacgggcgaactgcagctcagccgcgacctggacaacaaccggccgctggaggcgctcatggaggtgtctgtgtctgatggcatccacagcgtcacggccttctgcaccctgcgtgtcaccatcatcacggacgacatgctgaccaacagcatcactgtccgcctggagaacatgtcccaggagaagttcctgtccccgctgctggccctcttcgtggagggggtggccgccgtgctgtccaccaccaaggacgacgtcttcgtcttcaacgtccagaacgacaccgacgtcagctccaacatcctgaacgtgaccttctcggcgctgctgcctggcggcgtccgcggccagttcttcccgtcggaggacctgcaggagcagatctacctgaatcggacgctgctgaccaccatctccacgcagcgcgtgctgcccttcgacgacaacatctgcctgcgcgagccctgcgagaactacatgaagtgcgtgtccgttctgcgattcgacagctccgcgcccttcctcagctccaccaccgtgctcttccggcccatccaccccatcaacggcctgcgctgccgctgcccgcccggcttcaccggcgactactgcgagacggagatcgacctctgctactccgacccgtgcggcgccaacggccgctgccgcagccgcgagggcggctacacctgcgagtgcttcgaggacttcactggagagcactgtgaggtggatgcccgctcaggccgctgtgccaacggggtgtgcaagaacgggggcacctgcgtgaacctgctcatcggcggcttccactgcgtgtgtcctcctggcgagtatgagaggccctactgtgaggtgaccaccaggagcttcccgccccagtccttcgtcaccttccggggcctgagacagcgcttccacttcaccatctccctcacgtttgccactcaggaaaggaacggcttgcttctctacaacggccgcttcaatgagaagcacgacttcatcgccctggagatcgtggacgagcaggtgcagctcaccttctctgcaggcgagacaacaacgaccgtggcaccgaaggttcccagtggtgtgagtgacgggcggtggcactctgtgcaggtgcagtactacaacaagcccaatattggccacctgggcctgccccatgggccgtccggggaaaagatggccgtggtgacagtggatgattgtgacacaaccatggctgtgcgctttggaaaggacatcgggaactacagctgcgctgcccagggcactcagaccggctccaagaagtccctggatctgaccggccctctactcctggggggtgtccccaacctgccagaagacttcccagtgcacaaccggcagttcgtgggctgcatgcggaacctgtcagtcgacggcaaaaatgtggacatggccggattcatcgccaacaatggcacccgggaaggctgcgctgctcggaggaacttctgcgatgggaggcggtgtcagaatggaggcacctgtgtcaacaggtggaatatgtatctgtgtgagtgtccactccgattcggcgggaagaactgtgagcaagccatgcctcacccccagctcttcagcggtgagagcgtcgtgtcctggagtgacctgaacatcatcatctctgtgccctggtacctggggctcatgttccggacccggaaggaggacagcgttctgatggaggccaccagtggtgggcccaccagctttcgcctccagatcctgaacaactacctccagtttgaggtgtcccacggcccctccgatgtggagtccgtgatgctgtccgggttgcgggtgaccgacggggagtggcaccacctgctgatcgagctgaagaatgttaaggaggacagtgagatgaagcacctggtcaccatgaccttggactatgggatggaccagaacaaggcagatatcgggggcatgcttcccgggctgacggtaaggagcgtggtggtcggaggcgcctctgaagacaaggtctccgtgcgccgtggattccgaggctgcatgcagggagtgaggatgggggggacgcccaccaacgtcgccaccctgaacatgaacaacgcactcaaggtcagggtgaaggacggctgtgatgtggacgacccctgtacctcgagcccctgtccccccaatagccgctgccacgacgcctgggaggactacagctgcgtctgtgacaaagggtaccttggaataaactgtgtggatgcctgtcacctgaacccctgcgagaacatgggggcctgcgtgcgctcccccggctccccgcagggctacgtgtgcgagtgtgggcccagtcactacgggccgtactgtgagaacaaactcgaccttccgtgccccagaggctggtgggggaaccccgtctgtggaccctgccactgtgccgtcagcaaaggctttgatcccgactgtaataagaccaacggccagtgccaatgcaaggagaattactacaagctcctagcccaggacacctgtctgccctgcgactgcttcccccatggctcccacagccgcacttgcgacatggccaccgggcagtgtgcctgcaagcccggcgtcatcggccgccagtgcaaccgctgcgacaacccgtttgccgaggtcaccacgctcggctgtgaagtgatctacaatggctgtcccaaagcatttgaggccggcatctggtggccacagaccaagttcgggcagccggctgcggtgccatgccctaagggatccgttggaaatgcggtccgacactgcagcggggagaagggctggctgcccccagagctctttaactgtaccaccatctccttcgtggacctcagggccatgaatgagaagctgagccgcaatgagacgcaggtggacggcgccagggccctgcagctggtgagggcgctgcgcagtgctacacagcacacgggcacgctctttggcaatgacgtgcgcacggcctaccagctgctgggccacgtccttcagcacgagagctggcagcagggcttcgacctggcagccacgcaggacgccgactttcacgaggacgtcatccactcgggcagcgccctcctggccccagccaccagggcggcgtgggagcagatccagcggagcgagggcggcacggcacagctgctccggcgcctcgagggctacttcagcaacgtggcacgcaacgtgcggcggacgtacctgcggcccttcgtcatcgtcaccgccaacatgattcttgctgtcgacatctttgacaagttcaactttacgggagccagggtcccgcgattcgacaccatccatgaagagttccccagggagctggagtcctccgtctccttcccagccgacttcttcagaccacctgaagaaaaagaaggccccctgctgaggccggctggccggaggaccaccccgcagaccacgcgcccggggcctggcaccgagagggaggccccgatcagcaggcggaggcgacaccctgatgacgctggccagttcgccgtcgctctggtcatcatttaccgcaccctggggcagctcctgcccgagcgctacgaccccgaccgtcgcagcctccggttgcctcaccggcccatcattaataccccgatggtgagcacgctggtgtacagcgagggggctccgctcccgagacccctggagaggcccgtcctggtggagttcgccctgctggaggtggaggagcgaaccaagcctgtctgcgtgttctggaaccactccctggccgttggtgggacgggagggtggtctgcccggggctgcgagctcctgtccaggaaccggacacatgtcgcctgccagtgcagccacacagccagctttgcggtgctcatggatatctccaggcgtgagaacggggaggtcctgcctctgaagattgtcacctatgccgctgtgtccttgtcactggcagccctgctggtggccttcgtcctcctgagcctggtccgcatgctgcgctccaacctgcacagcattcacaagcacctcgccgtggcgctcttcctctctcagctggtgttcgtgattgggatcaaccagacggaaaacccgtttctgtgcacagtggttgccatcctcctccactacatctacatgagcacctttgcctggaccctcgtggagagcctgcatgtctaccgcatgctgaccgaggtgcgcaacatcgacacggggcccatgcggttctactacgtcgtgggctggggcatcccggccattgtcacaggactggcggtcggcctggacccccagggctacgggaaccccgacttctgctggctgtcgcttcaagacaccctgatttggagctttgcggggcccatcggagctgttataatcatcaacacagtcacttctgtcctatctgcaaaggtttcctgccaaagaaagcaccattattatgggaaaaaagggatcgtctccctgctgaggaccgcattcctcctgctgctgctcatcagcgccacctggctgctggggctgctggctgtgaaccgcgatgcactgagctttcactacctcttcgccatcttcagcggcttacagggccccttcgtcctccttttccactgcgtgctcaaccaggaggtccggaagcacctgaagggcgtgctcggcgggaggaagctgcacctggaggactccgccaccaccagggccaccctgctgacgcgctccctcaactgcaacaccaccttcggtgacgggcctgacatgctgcgcacagacttgggcgagtccaccgcctcgctggacagcatcgtcagggatgaagggatccagaagctcggcgtgtcctctgggctggtgaggggcagccacggagagccagacgcgtccctcatgcccaggagctgcaaggatccccctggccacgattccgactcagatagcgagctgtccctggatgagcagagcagctcttacgcctcctcacactcgtcagacagcgaggacgatggggtgggagctgaggaaaaatgggacccggccaggggcgccgtccacagcacccccaaaggggacgctgtggccaaccacgttccggccggctggcccgaccagagcctggctgagagtgacagtgaggaccccagcggcaagccccgcctgaaggtggagaccaaggtcagcgtggagctgcaccgcgaggagcagggcagtcaccgtggagagtaccccccggaccaggagagcgggggcgcagccaggcttgctagcagccagcccccagagcagaggaaaggcatcttgaaaaataaagtcacctacccgccgccgctgacgctgacggagcagacgctgaagggccggctccgggagaagctggccgactgtgagcagagccccacatcctcgcgcacgtcttccctgggctctggcggccccgactgcgccatcacagtcaagagccctgggagggagccggggcgtgaccacctcaacggggtggccatgaatgtgcgcactgggagcgcccaggccgatggctccgactctgagaaaccgtgaggcaagcccgtcaccccacacaggctgcggcatcaccctcagaccttggagcccaaggggccactgcccttgaagtggagtgggcccagagtgtggcggtccccatggtggcagccccccgactgatcatccagacacaaaggtcttggttctcccaggagctcagggcctgtcagacctggtgacaagtgccaaaggccacaggcatgagggaggcgtggaccactgggccagcaccgctgagtcctaagactgcagtcaaagccagaactgagaggggaccccagactgggcccagaggctggccagagttcaggaacgccgggcacagaccaaagaccgcggtccagccccgcccaggcgggcatctcatggcagtgcggacccgtggctggcagcccgggcagtcctttgcaaaggcaccccttgtcttaaaatcacttcgctatgtgggaaaggtggagatacttttatatatttgtatgggactctgaggaggtgcaacctgtatatatattgcattcgtgctgactttgttatcccgagagatccatgcaatgatctcttgctgtcttctctgtcaagattgcacagttgtacttgaatctggcatgtgttgacgaaactggtgccccagcagatcaaaggtgggaaatacgtcagcagtggggctaaaaccaagcggctagaagccctacagctgccttcggccaggaagtgaggatggtgtgggccctccccgccggccccctgggtccccagtgttcgctgtgtgtgcgtttgtcctctgctgccatctgccccggctgtgtgaattcaagacagggcagtgcagcactaggcaggtgtgaggagccctgctgaggtcactgtggggcacggttgccacacggctgtcatttttcacctggtcattctgtgaccaccaccccctcccctcaccgcctcccaggtggcccgggagctgcaggtggggatggctttgtcctttgctcctgctccccgtgggacctgggaccttaaagcgttgcaggttcctgatttggacagaggtgtggggccttccaggccgttacatacctcctgccaattctctaactctctgagactgcgaggatctccaggcagggttctcccctctggagtctgaccaattacttcattttgcttcaaatggccaattgtgcagagggacaaagccacagccacactcttcaacggttaccaaactgtttttggaaattcacaccaaggtcgggcccactgcaggcagctggcacagcgtggcccgaggggctgtggaacgggtcccggaactgtcagacatgtttgattttagcgtttcctttgttcttcaaatcaggtgcccaaataagtgatcagcacagctgcttccaaataggagaaaccataaaataggatgaaaatcaagtaaaatgcaaagatgtccacactgttttaaacttgaccctgatgaaaatgtgagcactgttagcagatgcctatgggagaggaaaagcgtatctgaaaatggtccaggacaggaggatgaaatgagatcccagagtcctcacacctgaatgaattatacatgtgccttaccaggtgagtggtctttcgaagataaaaaactctagtccctttaaacgtttgcccctggcgtttcctaagtacgaaaaggtttttaagtcttcgaacagtctcctttcatgactttaacaggattctgccccctgaggtgtaatttttttgttctatttttttccacgtactccacagccaacatcacgaggtgtaatttttaatttgatcagaactgttaccaaaaaacaactgtcagttttattgagatgggaaaaatgtaaacctatttttattacttaagactttatgggagagattagacactggaggtttttaacagaacgtgtatttattaatgttcaaaacactggaattacaaatgagaagagtctacaataaattaagatttttgaatttgtacttctgcggtgctggtttttctccacaaacacccccgcccctccccatgcccagggtggccgtggaagggacggtttacggacgtgcagctgagctgtccgtgtcccatgctccctcagccagtggaacgtgccggaactttttgtccattccctagtaggcctgccacagcctagatgggcagtttttgtctttcaccaaatttgaggactttttttttttgccattatttcttcagttttcttttcttgcactgatctttctcctctccttctgtgactccagtgactcagacgttagacctcttgatgttttcccactggtccctgaggctctgttc

SEQ ID NO: 444 - protein, 3014 aa, Homo sapiens
MAPPPPPVLPVLLLLAAAAALPAMGLRAAAWEPRVPGGTRAFALRPGCTYAVGAACTPRAPRELLDVGRDGRLAGRRRVSGAGRPLPLQVRLVARSAPTALSRRLRARTHLPGCGARARLCGTGARLCGALCFPVPGGCAAAQHSALAAPTTLPACRCPPRPRPRCPGRPICLPPGGSVRLRLLCALRRAAGAVRVGLALEAATAGTPSASPSPSPPLPPNLPEARAGPARRARRGTSGRGSLKFPMPNYQVALFENEPAGTLILQLHAHYTIEGEEERVSYYMEGLFDERSRGYFRIDSATGAVSTDSVLDRETKETHVLRVKAVDYSTPPRSATTYITVLVKDTNDHSPVFEQSEYRERVRENLEVGYEVLTIRASDRDSPINANLRYRVLGGAWDVFQLNESSGVVSTRAVLDREEAAEYQLLVEANDQGRNPGPLSATATVYIEVEDENDNYPQFSEQNYVVQVPEDVGLNTAVLRVQATDRDQGQNAAIHYSILSGNVAGQFYLHSLSGILDVINPLDFEDVQKYSLSIKAQDGGRPPLINSSGVVSVQVLDVNDNEPIFVSSPFQATVLENVPLGYPVVHIQAVDADSGENARLHYRLVDTASTFLGGGSAGPKNPAPTPDFPFQIHNSSGWITVCAELDREEVEHYSFGVEAVDHGSPPMSSSTSVSITVLDVNDNDPVFTQPTYELRLNEDAAVGSSVLTLQARDRDANSVITYQLTGGNTRNRFALSSQRGGGLITLALPLDYKQEQQYVLAVTASDGTRSHTAHVLINVTDANTHRPVFQSSHYTVSVSEDRPVGTSIATLSANDEDTGENARITYVIQDPVPQFRIDPDSGTMYTMMELDYENQVAYTLTIMAQDNGIPQKSDTTTLEILILDANDNAPQFLWDFYQGSIFEDAPPSTSILQVSATDRDSGPNGRLLYTFQGGDDGDGDFYIEPTSGVIRTQRRLDRENVAVYNLWALAVDRGSPTPLSASVEIQVTILDINDNAPMFEKDELELFVEENNPVGSVVAKIRANDPDEGPNAQIMYQIVEGDMRHFFQLDLLNGDLRAMVELDFEVRREYVLVVQATSAPLVSRATVHILLVDQNDNPPVLPDFQILFNNYVTNKSNSFPTGVIGCIPAHDPDVSDSLNYTFVQGNELRLLLLDPATGELQLSRDLDNNRPLEALMEVSVSDGIHSVTAFCTLRVTIITDDMLTNSITVRLENMSQEKFLSPLLALFVEGVAAVLSTTKDDVFVFNVQNDTDVSSNILNVTFSALLPGGVRGQFFPSEDLQEQIYLNRTLLTTISTQRVLPFDDNICLREPCENYMKCVSVLRFDSSAPFLSSTTVLFRPIHPINGLRCRCPPGFTGDYCETEIDLCYSDPCGANGRCRSREGGYTCECFEDFTGEHCEVDARSGRCANGVCKNGGTCVNLLIGGFHCVCPPGEYERPYCEVTTRSFPPQSFVTFRGLRQRFHFTISLTFATQERNGLLLYNGRFNEKHDFIALEIVDEQVQLTFSAGETTTTVAPKVPSGVSDGRWHSVQVQYYNKPNIGHLGLPHGPSGEKMAVVTVDDCDTTMAVRFGKDIGNYSCAAQGTQTGSKKSLDLTGPLLLGGVPNLPEDFPVHNRQFVGCMRNLSVDGKNVDMAGFIANNGTREGCAARRNFCDGRRCQNGGTCVNRWNMYLCECPLRFGGKNCEQAMPHPQLFSGESVVSWSDLNIIISVPWYLGLMFRTRKEDSVLMEATSGGPTSFRLQILNNYLQFEVSHGPSDVESVMLSGLRVTDGEWHHLLIELKNVKEDSEMKHLVTMTLDYGMDQNKADIGGMLPGLTVRSVVVGGASEDKVSVRRGFRGCMQGVRMGGTPTNVATLNMNNALKVRVKDGCDVDDPCTSSPCPPNSRCHDAWEDYSCVCDKGYLGINCVDACHLNPCENMGACVRSPGSPQGYVCECGPSHYGPYCENKLDLPCPRGWWGNPVCGPCHCAVSKGFDPDCNKTNGQCQCKENYYKLLAQDTCLPCDCFPHGSHSRTCDMATGQCACKPGVIGRQCNRCDNPFAEVTTLGCEVIYNGCPKAFEAGIWWPQTKFGQPAAVPCPKGSVGNAVRHCSGEKGWLPPELFNCTTISFVDLRAMNEKLSRNETQVDGARALQLVRALRSATQHTGTLFGNDVRTAYQLLGHVLQHESWQQGFDLAATQDADFHEDVIHSGSALLAPATRAAWEQIQRSEGGTAQLLRRLEGYFSNVARNVRRTYLRPFVIVTANMILAVDIFDKFNFTGARVPRFDTIHEEFPRELESSVSFPADFFRPPEEKEGPLLRPAGRRTTPQTTRPGPGTEREAPISRRRRHPDDAGQFAVALVIIYRTLGQLLPERYDPDRRSLRLPHRPIINTPMVSTLVYSEGAPLPRPLERPVLVEFALLEVEERTKPVCVFWNHSLAVGGTGGWSARGCELLSRNRTHVACQCSHTASFAVLMDISRRENGEVLPLKIVTYAAVSLSLAALLVAFVLLSLVRMLRSNLHSIHKHLAVALFLSQLVFVIGINQTENPFLCTVVAILLHYIYMSTFAWTLVESLHVYRMLTEVRNIDTGPMRFYYVVGWGIPAIVTGLAVGLDPQGYGNPDFCWLSLQDTLIWSFAGPIGAVIIINTVTSVLSAKVSCQRKHHYYGKKGIVSLLRTAFLLLLLISATWLLGLLAVNRDALSFHYLFAIFSGLQGPFVLLFHCVLNQEVRKHLKGVLGGRKLHLEDSATTRATLLTRSLNCNTTFGDGPDMLRTDLGESTASLDSIVRDEGIQKLGVSSGLVRGSHGEPDASLMPRSCKDPPGHDSDSDSELSLDEQSSSYASSHSSDSEDDGVGAEEKWDPARGAVHSTPKGDAVANHVPAGWPDQSLAESDSEDPSGKPRLKVETKVSVELHREEQGSHRGEYPPDQESGGAARLASSQPPEQRKGILKNKVTYPPPLTLTEQTLKGRLREKLADCEQSPTSSRTSSLGSGGPDCAITVKSPGREPGRDHLNGVAMNVRTGSAQADGSDSEKP

SEQ ID NO: 445 - DNA, 1074 bp, Homo sapiens
atggatttaccagtgaacctaacctccttttccctctccaccccctcccctttggagaccaaccacagcctcggcaaagacgacctgcgccccagctcgcccctgctctcggtcttcggagtgcttattctcaccttgctgggctttctggtggcggcgacgttcgcctggaacctgctggtgctggcgaccatcctccgtgtacgcaccttccaccgcgtgccccacaacctggtggcatccatggccgtctcggatgtcctggtggccgcgctggtcatgccgctgagcctggtgcatgagctgtccgggcgccgctggcagctaggtcggaggctgtgccagctttggatcgcgtgcgacgtgctttgctgcacggccagcatctggaacgtgacggccatagccctggaccgctactggtccatcacgcgccacatggaatacacgctccgcacccgcaagtgcgtctccaacgtcatgatcgcgctcacctgggcactctccgctgtcatctctctggccccgctgctttttggctggggagagacgtactctgagggcagcgaggagtgccaggtaagccgcgagccttcctacgccgtgttctccaccgtaggcgccttctacctgccgctctgtgtggtgctcttcgtgtactggaagatctacaaggctgccaagttccgcgtgggctccaggaagaccaatagcgtctcacccatatccgaagctgtggaggtgaaggactctgccaaacagccccagatggtgttcacggtccgccacgccaccgtcaccttccagccagaaggggacacgtggcgggagcagaaggagcagcgggccgccctcatggtgggcatcctcattggcgtgttcgtgctctgctggatccccttctttctcaccgagctcatcagtcccctctgctcctgtgacatccccgccatctggaaaagcatcttcctgtggcttggctactccaactccttctttaaccccctgatctatacggctttcaacaagaactacaacagcgccttcaagaacttcttttctaggcaacactga

SEQ ID NO: 446 - protein, 357 aa, Homo sapiens
MDLPVNLTSFSLSTPSPLETNHSLGKDDLRPSSPLLSVFGVLILTLLGFLVAATFAWNLLVLATILRVRTFHRVPHNLVASMAVSDVLVAALVMPLSLVHELSGRRWQLGRRLCQLWIACDVLCCTASIWNVTAIALDRYWSITRHMEYTLRTRKCVSNVMIALTWALSAVISLAPLLFGWGETYSEGSEECQVSREPSYAVFSTVGAFYLPLCVVLFVYWKIYKAAKFRVGSRKTNSVSPISEAVEVKDSAKQPQMVFTVRHATVTFQPEGDTWREQKEQRAALMVGILIGVFVLCWIPFFLTELISPLCSCDIPAIWKSIFLWLGYSNSFFNPLIYTAFNKNYNSAFKNFFSRQH

SEQ ID NO: 447 - DNA, 2932 bp, Homo sapiens
gtaatgcagagataataaaacttcttaggtccataggtcttataataatttaataacctaaacatggtatacaaattcctccaaacccaataacataattatagtttcaaaaagttccccaaactttcaagttagattttattgctttgatgagtggctttaaatatgaaaagtcttgcctgtgaagggcaatccttttcccgtggactgggatctatagaaatacagaaatgtgcccaggggttcatctccctaataaccatcattcacatttctcaacctccctaataaccagccaccatgtgagaaggatccacagttactgtttatgactataattaactagtacctgggactggtcagtggagttggttgcaacctgatgctaaggatgtcaaagttgtctcggcctctgttcccagccagtaagtaattccctggcctcgggccataccccctaatcttggtcagctgattatgacaggcagacagcacagtaaataacactatatattaagaaaacccaaagcatatgtatcaatggtatatacccaacagcatcctaggaatggagagtctgtagcaagggcctccaatgtgaaggtcaacacagtcactgtgatgcgtgtatttccattttgtaaagcatgatctctggtggtcatttttatcttcctaacttattggaaaagtctcctgttttgggggcccgcccctggtcacagccagactgactcagtttccctgggaggtcccgctcgagcccgtccttcccctccctctgcccgcccccagccctcgccccaccctcggcgcccgcacatctgcctgctcagctccagacggcgcccggacccccgggcgcgggatccagccaggtgggagccccgcagatgaggtctctgaaggtgtgcctgaaccagtgccagcctgccctgtctgcagcatcggcctgatggggtggtgactgatccctcagggctccggagccatgtggcccaacggcagttccctggggccctgtttccggcccacaaacattaccctggaggagagacggctgatcgcctcgccctggttcgccgcctccttctgcgtggtgggcctggcctccaacctgctggccctgagcgtgctggcgggcgcgcggcaggggggttcgcacacgcgctcctccttcctcaccttcctctgcggcctcgtcctcaccgacttcctggggctgctggtgaccggtaccatcgtggtgtcccagcacgccgcgctcttcgagtggcacgccgtggaccctggctgccgtctctgtcgcttcatgggcgtcgtcatgatcttcttcggcctgtccccgctgctgctgggggccgccatggcctcagagcgctacctgggtatcacccggcccttctcgcgcccggcggtcgcctcgcagcgccgcgcctgggccaccgtggggctggtgtgggcggccgcgctggcgctgggcctgctgcccctgctgggcgtgggtcgctacaccgtgcaatacccggggtcctggtgcttcctgacgctgggcgccgagtccggggacgtggccttcgggctgctcttctccatgctgggcggcctctcggtcgggctgtccttcctgctgaacacggtcagcgtggccaccctgtgccacgtctaccacgggcaggaggcggcccagcagcgtccccgggactccgaggtggagatgatggctcagctcctggggatcatggtggtggccagcgtgtgttggctgccccttctggtcttcattgcccagacagtgctgcgaaacccgcctgccatgagccccgccgggcagctgtcccgcaccacggagaaggagctgctcatctacttgcgcgtggccacctggaaccagatcctggacccctgggtgtatatcctgttccgccgcgccgtgctccggcgtctccagcctcgcctcagcacccggcccaggtcgctgtccctccagccccagctcacgcagcgctccgggctgcagtaggaagtggacagagcgcccctcccgcgcctttccgcggagcccttggcccctcggacagcccatctgcctgttctgaggattcaggggctgggggtgctggatggacagtgggcatcagcagcagggttttgggttgaccccaatccaacccggggacccccaactcctccctgatccttttaccaagcactctcccttcctcggcccctttttcccatccagagctcccaccccttctctgcgtccctcccaaccccaggaagggcatgcagacattggaagagggtcttgcattgctatttttttttttagacggagtcttgctctgtcccccaggctggagtgcagtggcgcaatctcagctcactgcaacctccacctcccgggttcaagcgattctcctgcctcagcctcctgagtagctgggactataggcgcgcgccaccacgcccggctaatttttgtatttttagtagagacggggtttcaccgtgttggccaggctggtcttgaactcctgacctcaggtgattcaccagcctcagcctcccaaagtgctgggatcacaggcatgaaccaccacacctggccattttttttttttttttagacggagtctcactctgtggcccagcctggagtacagtggcacgatctcggctcactgcaacctccgcctcccgggttcaagcgattctcgtgcctcagcctcccgagcagctgggattacaggcgtaagccactgcgcccggccttgcatgctctttgaccctgaatttgacctacttgctggggtacagttgcttccttttgaacctccaacagggaaggctctgtccagaaaggattgaatgtgaaacgggggcacccccttttcttgccaaaatatatctctgcctttggttttat

SEQ ID NO: 448 - protein, 343 aa, Homo sapiens
MWPNGSSLGPCFRPTNITLEERRLIASPWFAASFCVVGLASNLLALSVLAGARQGGSHTRSSFLTFLCGLVLTDFLGLLVTGTIVVSQHAALFEWHAVDPGCRLCRFMGVVMIFFGLSPLLLGAAMASERYLGITRPFSRPAVASQRRAWATVGLVWAAALALGLLPLLGVGRYTVQYPGSWCFLTLGAESGDVAFGLLFSMLGGLSVGLSFLLNTVSVATLCHVYHGQEAAQQRPRDSEVEMMAQLLGIMVVASVCWLPLLVFIAQTVLRNPPAMSPAGQLSRTTEKELLIYLRVATWNQILDPWVYILFRRAVLRRLQPRLSTRPRSLSLQPQLTQRSGLQ

SEQ ID NO: 449 - DNA, 1002 bp, Homo sapiens
atggagtcctcaggcaacccagagagcaccacctttttttactatgaccttcagagccagccgtgtgagaaccaggcctgggtctttgctaccctcgccaccactgtcctgtactgcctggtgtttctcctcagcctagtgggcaacagcctggtcctgtgggtcctggtgaagtatgagagcctggagtccctcaccaacatcttcatcctcaacctgtgcctctcagacctggtgttcgcctgcttgttgcctgtgtggatctccccataccactggggctgggtgctgggagacttcctctgcaaactcctcaatatgatcttctccatcagcctctacagcagcatcttcttcctgaccatcatgaccatccaccgctacctgtcggtagtgagccccctctccaccctgcgcgtccccaccctccgctgccgggtgctggtgaccatggctgtgtgggtagccagcatcctgtcctccatcctcgacaccatcttccacaaggtgctttcttcgggctgtgattattccgaactcacgtggtacctcacctccgtctaccagcacaacctcttcttcctgctgtccctggggattatcctgttctgctacgtggagatcctcaggaccctgttccgctcacgctccaagcggcgccaccgcacggtcaagctcatcttcgccatcgtggtggcctacttcctcagctggggtccctacaacttcaccctgtttctgcagacgctgtttcggacccagatcatccggagctgcgaggccaaacagcagctagaatacgccctgctcatctgccgcaacctcgccttctcccactgctgctttaacccggtgctctatgtcttcgtgggggtcaagttccgcacacacctgaaacatgttctccggcagttctggttctgccggctgcaggcacccagcccagcctcgatcccccactcccctggtgccttcgcctatgagggcgcctccttctactga

SEQ ID NO: 450 - protein, 333 aa, Homo sapiens
MESSGNPESTTFFYYDLQSQPCENQAWVFATLATTVLYCLVFLLSLVGNSLVLWVLVKYESLESLTNIFILNLCLSDLVFACLLPVWISPYHWGWVLGDFLCKLLNMIFSISLYSSIFFLTIMTIHRYLSVVSPLSTLRVPTLRCRVLVTMAVWVASILSSILDTIFHKVLSSGCDYSELTWYLTSVYQHNLFFLLSLGIILFCYVEILRTLFRSRSKRRHRTVKLIFAIVVAYFLSWGPYNFTLFLQTLFRTQIIRSCEAKQQLEYALLICRNLAFSHCCFNPVLYVFVGVKFRTHLKHVLRQFWFCRLQAPSPASIPHSPGAFAYEGASFY

SEQ ID NO: 451 - DNA, 2054 bp, Homo sapiens
gcgatggcgatgatgcctctagtcctgcatcatccagagcggcaggcgagctggggtccggactgcgagatggaggaggggcgcgctgcggcacccggcaggcttatctgtcttgggcctcttttgtcacatattgctcatctgtgagctgaggccctgactcactgagtatttttggggagcagaagaaggagacatttctctccgaaaatgaactcaacaggccaccttcaggatgcccccaatgccacctcgctccatgtgcctcactcacaggaaggaaacagcacctctctccaggagggtcttcaggatctcatccacacagccaccttggtgacctgtacttttctactggcggtcatcttctgcctgggttcctatggcaacttcattgtcttcttgtccttcttcgatccagccttcaggaaattcagaaccaactttgatttcatgatcctgaacctgtccttctgtgacctcttcatttgtggagtgacagcccccatgttcacctttgtgttattcttcagctcagccagtagtatcccggatgctttctgcttcactttccatctcaccagttcaggcttcatcatcatgtctctgaagacagtggcagtgatcgccctgcaccggctccggatggtgttggggaaacagcctaatcgcacggcctcctttccctgcaccgtactcctcaccctgcttctctgggccaccagtttcacccttgccaccttggctaccttgaaaaccagcaagtcccacctctgtcttcccatgtccagtctgattgctggaaaagggaaagccattttgtctctctatgtggtcgacttcaccttctgtgttgctgtggtctctgtctcttacatcatgattgctcagaccctgcggaagaacgctcaagtcagaaagtgcccccctgtaatcacagtcgatgcttccagaccacagcctttcatgggggtccctgtgcagggaggtggagatcccatccagtgtgccatgccggctctgtataggaaccagaattacaacaaactgcagcacgttcagacccgtggatataccaagagtcccaaccaactggtcacccctgcagcaagccgactccagctcgtatcagccatcaacctctccactgccaaggattccaaagccgtggtcacctgtgtgatcattgtgctgtcagtcctggtgtgctgtcttccactggggatttccttggtacaggtggttctctccagcaatgggagcttcattctttaccagtttgaattgtttggatttactcttatatttttcaagtcaggattaaacccttttatatattctcggaacagtgcagggctgagaaggaaagtgctctggtgcctccaatacataggcctgggttttttctgctgcaaacaaaagactcgacttcgagccatgggaaaagggaacctcgaagtcaacagaaacaaatcctcccatcatgaaacaaactctgcctacatgttatctccaaagccacagaagaaatttgtggaccaggcttgtggcccaagtcattcaaaagaaagtatggtgagtcccaagatctctgctggacatcaacactgtggtcagagcagctcgacccccatcaacactcggattgaaccttactacagcatctataacagcagcccttcccaggaggagagcagcccatgtaacttacagccagtaaactcttttggatttgccaattcatatattgccatgcattatcacaccactaatgacttagtgcaggaatatgacagcacttcagccaagcagattccagtcccctccgtttaaagtcatggaggctataggatcttatgtaaacagtttttgtttctgatagtaatggactttattctaacttgagatcagtggcggatcaaaacctacaagattcaactgaaaagttggcagttatggttttctttcatctgatgtgtcagtatctgttgatttgctttgtagtttgttgacatcttaagatttgatgtgaaagttttagattttttaccctg

SEQ ID NO: 452 - protein, 540 aa, Homo sapiens
MNSTGHLQDAPNATSLHVPHSQEGNSTSLQEGLQDLIHTATLVTCTFLLAVIFCLGSYGNFIVFLSFFDPAFRKFRTNFDFMILNLSFCDLFICGVTAPMFTFVLFFSSASSIPDAFCFTFHLTSSGFIIMSLKTVAVIALHRLRMVLGKQPNRTASFPCTVLLTLLLWATSFTLATLATLKTSKSHLCLPMSSLIAGKGKAILSLYVVDFTFCVAVVSVSYIMIAQTLRKNAQVRKCPPVITVDASRPQPFMGVPVQGGGDPIQCAMPALYRNQNYNKLQHVQTRGYTKSPNQLVTPAASRLQLVSAINLSTAKDSKAVVTCVIIVLSVLVCCLPLGISLVQVVLSSNGSFILYQFELFGFTLIFFKSGLNPFIYSRNSAGLRRKVLWCLQYIGLGFFCCKQKTRLRAMGKGNLEVNRNKSSHHETNSAYMLSPKPQKKFVDQACGPSHSKESMVSPKISAGHQHCGQSSSTPINTRIEPYYSIYNSSPSQEESSPCNLQPVNSFGFANSYIAMHYHTTNDLVQEYDSTSAKQIPVPSV

SEQ ID NO: 453 - DNA, 2456 bp, Homo sapiens
ataacagcatgaagtgccgtggaactggaataggcgtgtcctctccctcgaccctccccctccttgtccctctgctcacccctcgctcgttccctccctccggcgagggccgcctttataacaactgctcagagtgcgagggcgggatagctgtccaaggtctcccccagcactgaggagctcgcctgctgccctcttgcgcgcgggaagcagcaccaagttcacggccaacgccttggcactagggtccagaatggctacaacagtccctgatggttgccgcaatggcctgaaatccaagtactacagactttgtgataaggctgaagcttggggcatcgtcctagaaacggtggccacagccggggttgtgacctcggtggccttcatgctcactctcccgatcctcgtctgcaaggtgcaggactccaacaggcgaaaaatgctgcctactcagtttctcttcctcctgggtgtgttgggcatctttggcctcaccttcgccttcatcatcggactggacgggagcacagggcccacacgcttcttcctctttgggatcctcttttccatctgcttctcctgcctgctggctcatgctgtcagtctgaccaagctcgtccgggggaggaagcccctttccctgttggtgattctgggtctggccgtgggcttcagcctagtccaggatgttatcgctattgaatatattgtcctgaccatgaataggaccaacgtcaatgtcttttctgagctttccgctcctcgtcgcaatgaagactttgtcctcctgctcacctacgtcctcttcttgatggcgctgaccttcctcatgtcctccttcaccttctgtggttccttcacgggctggaagagacatggggcccacatctacctcacgatgctcctctccattgccatctgggtggcctggatcaccctgctcatgcttcctgactttgaccgcaggtgggatgacaccatcctcagctccgccttggctgccaatggctgggtgttcctgttggcttatgttagtcccgagttttggctgctcacaaagcaacgaaaccccatggattatcctgttgaggatgctttctgtaaacctcaactcgtgaagaagagctatggtgtggagaacagagcctactctcaagaggaaatcactcaaggttttgaagagacaggggacacgctctatgccccctattccacacattttcagctgcagaaccagcctccccaaaaggaattctccatcccacgggcccacgcttggccgagcccttacaaagactatgaagtaaagaaagagggcagctaactctgtcctgaagagtgggacaaatgcagccgggcggcagatctagcgggagctcaaagggatgtgggcgaaatcttgagtcttctgagaaaactgtacaagacactacgggaacagtttgcctccctcccagcctcaaccacaattcttccatgctggggctgatgtgggctagtaagactccagttcttagaggcgctgtagtatttttttttttttgtctcatcctttggatacttcttttaagtgggagtctcaggcaactcaagtttagacccttactctttttgtttgttttttgaaacaggatcttgctctgtcacccaggcttgagtgcagtggtgcgatcacagcccagtgcagcctcgaccacctgtgctcaagcaatcctcccatctccatctcccaaagtgctgggatgacaggcgtgagccacagctcccagcctaggcccttaatcttgctgttattttccatggactaaaggtctggtcatctgagctcacgctggctcacacagctctaggggcctgctcctctaactcacagtgggttttgtgaggctctgtggcccagagcagacctgcatatctgagcaaaaatagcaaaagcctctctcagcccactggcctgaatctacactggaagccaacttgctggcacccccgctccccaacccttcttgcctgggtaggagaggctaaagatcaccctaaatttactcatctctctagtgctgcctcacattgggcctcagcagctccccagcaccaattcacaggtcacccctctcttcttgcactgtccccaaacttgctgtcaattccgagatctaatctccccctacgctctgccaggaattctttcagacctcactagcacaagcccggttgctccttgtcaggagaatttgtagatcattctcacttcaaattcctggggctgatacttctctcatcttgcaccccaacctctgtaaatagatttaccgcatttacggctgcattctgtaagtgggcatggtctcctaatggaggagtgttcattgtataataagttattcacctgagtatgcaataaagatgtggtggccactctttcatggtggtggcagcaaaaaaaaaaaaaa

SEQ ID NO: 454 - protein, 357 aa, Homo sapiens
MATTVPDGCRNGLKSKYYRLCDKAEAWGIVLETVATAGVVTSVAFMLTLPILVCKVQDSNRRKMLPTQFLFLLGVLGIFGLTFAFIIGLDGSTGPTRFFLFGILFSICFSCLLAHAVSLTKLVRGRKPLSLLVILGLAVGFSLVQDVIAIEYIVLTMNRTNVNVFSELSAPRRNEDFVLLLTYVLFLMALTFLMSSFTFCGSFTGWKRHGAHIYLTMLLSIAIWVAWITLLMLPDFDRRWDDTILSSALAANGWVFLLAYVSPEFWLLTKQRNPMDYPVEDAFCKPQLVKKSYGVENRAYSQEEITQGFEETGDTLYAPYSTHFQLQNQPPQKEFSIPRAHAWPSPYKDYEVKKEGS

SEQ ID NO: 455 - DNA, 1197 bp, Homo sapiens
atggggacctgtgacattgtgactgaagccaatatctcatctggccctgagagcaacaccacgggcatcacagccttctccatgcccagctggcagctggcactgtgggcaccagcctacctggccctggtgctggtggccgtgacgggtaatgccatcgtcatctggatcatcctggcccatcggaggatgcgcacagtcaccaactacttcatcgtcaatctggcgctggctgacctctgcatggctgccttcaatgccgccttcaactttgtctatgccagccacaacatctggtactttggccgtgccttctgctacttccagaacctcttccccatcacagccatgtttgtcagcatctactccatgaccgccattgctgccgacaggtacatggccatcgtccaccccttccagcctcggctttcagctcccagcaccaaggcggttattgctggcatctggctggtggctctcgccctggcctcccctcagtgcttctactccaccgtcaccatggaccagggtgccaccaagtgcgtggtggcctggcccgaagacagcgggggcaagacgctcctcctgtaccacctcgtggtgatcgccctcatctacttcctgccgctcgcggtgatgtttgtagcctacagcgtcatcggcctcacgctctggaggcgcgcagtgcccggacatcaggcgcacggtgccaacctccgccatctgcaggccaagaagaagtttgtgaagaccatggtgctggtggtgctgacgtttgccatctgctggctgccctaccacctctacttcatcctgggcagcttccaggaggacatctactgccacaagttcatccagcaagtctacctggcactcttctggttggccatgagctctaccatgtacaatcccatcatctactgctgtctcaaccacaggtttcgctctgggttccggcttgccttccgctgctgcccatgggtcacacccaccaaggaagataagctcgagctgactcccacgacctccctctccacgagagtcaacaggtgtcacactaaggagactttgttcatggctggggacacagccccctccgaggctaccagtggggaggcggggcgtccccaggatggatcagggctatggtttgggtatggtttgcttgcccccaccaaaactcatgttgaaatttga

SEQ ID NO: 456 - protein, 398 aa, Homo sapiens
MGTCDIVTEANISSGPESNTTGITAFSMPSWQLALWAPAYLALVLVAVTGNAIVIWIILAHRRMRTVTNYFIVNLALADLCMAAFNAAFNFVYASHNIWYFGRAFCYFQNLFPITAMFVSIYSMTAIAADRYMAIVHPFQPRLSAPSTKAVIAGIWLVALALASPQCFYSTVTMDQGATKCVVAWPEDSGGKTLLLYHLVVIALIYFLPLAVMFVAYSVIGLTLWRRAVPGHQAHGANLRHLQAKKKFVKTMVLVVLTFAICWLPYHLYFILGSFQEDIYCHKFIQQVYLALFWLAMSSTMYNPIIYCCLNHRFRSGFRLAFRCCPWVTPTKEDKLELTPTTSLSTRVNRCHTKETLFMAGDTAPSEATSGEAGRPQDGSGLWFGYGLLAPTKTHVEI

SEQ ID NO: 457 - DNA, 2470 bp, Homo sapiens
ccgctcccgggtctccttttggcctggggtaacccgaggtgcagagctgagaatgaggcgatttcggaggatggagaaatagccccgagtcccgtggaaaatgaggccggcggacttgctgcagctggtgctgctgctcgacctgcccagggacctgggcggaatggggtgttcgtctccaccctgcgagtgccatcaggaggaggacttcagagtcacctgcaaggatattcaacgcatccccagcttaccgcccagtacgcagactctgaagcttattgagactcacctgagaactattccaagtcatgcattttctaatctgcccaatatttccagaatctacgtatctatagatgtgactctgcagcagctggaatcacactccttctacaatttgagtaaagtgactcacatagaaattcggaataccaggaacttaacttacatagaccctgatgccctcaaagagctccccctcctaaagttccttggcattttcaacactggacttaaaatgttccctgacctgaccaaagtttattccactgatatattctttatacttgaaattacagacaacccttacatgacgtcaatccctgtgaatgcttttcagggactatgcaatgaaaccttgacactgaagctgtacaacaatggctttacttcagtccaaggatatgctttcaatgggacaaagctggatgctgtttacctaaacaagaataaatacctgacagttattgacaaagatgcatttggaggagtatacagtggaccaagcttgctggacgtgtctcaaaccagtgtcactgcccttccatccaaaggcctggagcacctgaaggaactgatagcaagaaacacctggactcttaagaaacttccactttccttgagtttccttcacctcacacgggctgacctttcttacccaagccactgctgtgcttttaagaatcagaagaaaatcagaggaatccttgagtccttgatgtgtaatgagagcagtatgcagagcttgcgccagagaaaatctgtgaatgccttgaatagccccctccaccaggaatatgaagagaatctgggtgacagcattgttgggtacaaggaaaagtccaagttccaggatactcataacaacgctcattattacgtcttctttgaagaacaagaggatgagatcattggttttggccaggagctcaaaaacccccaggaagagactctacaagcttttgacagccattatgactacaccatatgtggggacagtgaagacatggtgtgtacccccaagtccgatgagttcaacccgtgtgaagacataatgggctacaagttcctgagaattgtggtgtggttcgttagtctgctggctctcctgggcaatgtctttgtcctgcttattctcctcaccagccactacaaactgaacgtcccccgctttctcatgtgcaacctggcctttgcggatttctgcatggggatgtacctgctcctcatcgcctctgtagacctctacactcactctgagtactacaaccatgccatcgactggcagacaggccctgggtgcaacacggctggtttcttcactgtctttgcaagcgagttatcggtgtatacgctgacggtcatcaccctggagcgctggtatgccatcaccttcgccatgcgcctggaccggaagatccgcctcaggcacgcatgtgccatcatggttgggggctgggtttgctgcttccttctcgccctgcttcctttggtgggaataagtagctatgccaaagtcagtatctgcctgcccatggacaccgagacccctcttgctctggcatatattgtttttgttctgacgctcaacatagttgccttcgtcatcgtctgctgctgtcatgtgaagatctacatcacagtccgaaatccgcagtacaacccaggggacaaagataccaaaattgccaagaggatggctgtgttgatcttcaccgacttcatatgcatggccccaatctcattctatgctctgtcagcaattctgaacaagcctctcatcactgttagcaactccaaaatcttgctggtactcttctatccacttaactcctgtgccaatccattcctctatgctattttcaccaaggccttccagagggatgtgttcatcctactcagcaagtttggcatctgtaaacgccaggctcaggcataccgggggcagagggttcctccaaagaacagcactgatattcaggttcaaaaggttacccacgacatgaggcagggtctccacaacatggaagatgtctatgaactgattgaaaactcccatctaaccccaaagaagcaaggccaaatctcagaagagtatatgcaaacggttttgtaagttaacactacactactcacaatggtaggggaacttacaaaataatagtttcttgaatatgcattccaatcccat

SEQ ID NO: 458 - protein, 764 aa, Homo sapiens
MRPADLLQLVLLLDLPRDLGGMGCSSPPCECHQEEDFRVTCKDIQRIPSLPPSTQTLKLIETHLRTIPSHAFSNLPNISRIYVSIDVTLQQLESHSFYNLSKVTHIEIRNTRNLTYIDPDALKELPLLKFLGIFNTGLKMFPDLTKVYSTDIFFILEITDNPYMTSIPVNAFQGLCNETLTLKLYNNGFTSVQGYAFNGTKLDAVYLNKNKYLTVIDKDAFGGVYSGPSLLDVSQTSVTALPSKGLEHLKELIARNTWTLKKLPLSLSFLHLTRADLSYPSHCCAFKNQKKIRGILESLMCNESSMQSLRQRKSVNALNSPLHQEYEENLGDSIVGYKEKSKFQDTHNNAHYYVFFEEQEDEIIGFGQELKNPQEETLQAFDSHYDYTICGDSEDMVCTPKSDEFNPCEDIMGYKFLRIVVWFVSLLALLGNVFVLLILLTSHYKLNVPRFLMCNLAFADFCMGMYLLLIASVDLYTHSEYYNHAIDWQTGPGCNTAGFFTVFASELSVYTLTVITLERWYAITFAMRLDRKIRLRHACAIMVGGWVCCFLLALLPLVGISSYAKVSICLPMDTETPLALAYIVFVLTLNIVAFVIVCCCHVKIYITVRNPQYNPGDKDTKIAKRMAVLIFTDFICMAPISFYALSAILNKPLITVSNSKILLVLFYPLNSCANPFLYAIFTKAFQRDVFILLSKFGICKRQAQAYRGQRVPPKNSTDIQVQKVTHDMRQGLHNMEDVYELIENSHLTPKKQGQISEEYMQTVL

SEQ ID NO: 459 - DNA, 1979 bp, Homo sapiens
caggactgcctgagacaagccacaagctgaacagagaaagtggattgaacaaggacgcatttccccagtacatccacaacatgctgtccacatctcgttctcggtttatcagaaataccaacgagagcggtgaagaagtcaccaccttttttgattatgattacggtgctccctgtcataaatttgacgtgaagcaaattggggcccaactcctgcctccgctctactcgctggtgttcatctttggttttgtgggcaacatgctggtcgtcctcatcttaataaactgcaaaaagctgaagtgcttgactgacatttacctgctcaacctggccatctctgatctgctttttcttattactctcccattgtgggctcactctgctgcaaatgagtgggtctttgggaatgcaatgtgcaaattattcacagggctgtatcacatcggttattttggcggaatcttcttcatcatcctcctgacaatcgatagatacctggctattgtccatgctgtgtttgctttaaaagccaggacggtcacctttggggtggtgacaagtgtgatcacctggttggtggctgtgtttgcttctgtcccaggaatcatctttactaaatgccagaaagaagattctgtttatgtctgtggcccttattttccacgaggatggaataatttccacacaataatgaggaacattttggggctggtcctgccgctgctcatcatggtcatctgctactcgggaatcctgaaaaccctgcttcggtgtcgaaacgagaagaagaggcatagggcagtgagagtcatcttcaccatcatgattgtttactttctcttctggactccctataacattgtcattctcctgaacaccttccaggaattcttcggcctgagtaactgtgaaagcaccagtcaactggaccaagccacgcaggtgacagagactcttgggatgactcactgctgcatcaatcccatcatctatgccttcgttggggagaagttcagaaggtatctctcggtgttcttccgaaagcacatcaccaagcgcttctgcaaacaatgtccagttttctacagggagacagtggatggagtgacttcaacaaacacgccttccactggggagcaggaagtctcggctggtttataaaacgaggagcagtttgattgttgtttataaagggagataacaatctgtatataacaacaaacttcaagggtttgttgaacaatagaaacctgtaaagcaggtgcccaggaacctcagggctgtgtgtactaatacagactatgtcacccaatgcatatccaacatgtgctcagggaataatccagaaaaactgtgggtagagactttgactctccagaaagctcatctcagctcctgaaaaatgcctcattaccttgtgctaatcctctttttctagtcttcataatttcttcactcaatctctgattctgtcaatgtcttgaaatcaagggccagctggaggtgaagaagagaatgtgacaggcacagatgaatgggagtgagggatagtggggtcagggctgagaggagaaggagggagacatgagcatggctgagcctggacaaagacaaaggtgagcaaagggctcacgcattcagccaggagatgatactggtccttagccccatctgccacgtgtatttaaccttgaagggttcaccaggtcagggagagtttgggaactgcaataacctgggagttttggtggagtccgatgattctcttttgcataagtgcatgacatatttttgctttattacagtttatctatggcacccatgcaccttacatttgaaatctatgaaatatcatgctccattgttcagatgcttcttaggccacatccccctgtctaaaaattcagaaaatttttgtttataaaagatgcattatctatgatatgctaatatatgtatatgcaatataaaatttag

SEQ ID NO: 460 - protein, 360 aa, Homo sapiens
MLSTSRSRFIRNTNESGEEVTTFFDYDYGAPCHKFDVKQIGAQLLPPLYSLVFIFGFVGNMLVVLILINCKKLKCLTDIYLLNLAISDLLFLITLPLWAHSAANEWVFGNAMCKLFTGLYHIGYFGGIFFIILLTIDRYLAIVHAVFALKARTVTFGVVTSVITWLVAVFASVPGIIFTKCQKEDSVYVCGPYFPRGWNNFHTIMRNILGLVLPLLIMVICYSGILKTLLRCRNEKKRHRAVRVIFTIMIVYFLFWTPYNIVILLNTFQEFFGLSNCESTSQLDQATQVTETLGMTHCCINPIIYAFVGEKFRRYLSVFFRKHITKRFCKQCPVFYRETVDGVTSTNTPSTGEQEVSAGL

SEQ ID NO: 461 - DNA, 652 bp, Homo sapiens
cagaaatcctcaggtcccacagaaatgaacacgttttctaaaataaagtcaagccaagctgtcctaccccaaagaaaatcctagcaagcaaaggtggcttccttcctgaggccccagccaggtgtgtccaaccgtaggagccacagctcagagatcagagtgacttaacagttagagggcacttgatgagtaaggtgaaatagggaaaccaagtcagacgacacctcccttctgagtcccaaccatgtctacatctggagaagaacagttaagtcaagggatcacagacttgtgattagagactgccagggtccatatgaccaagcgggggtcccaggtgtgaagctggggttgaggatccattatctgaattttccactctatggatgatcacttttattcttttccttttcttgaatttatttccatttgtttattcctaaattccctggtagatcacctgtgaaagcttgcaactgtctgataagaataaagggggaaggatttgactttacagcagagacttcagaaggagtcctctctaggagcaaattgggggcaatccagtgggaaggaggtggaagactgcacttgagctgcgtttggacaacaggcacacaatctttacttacttttcaggctgctttgaggt

SEQ ID NO: 462 - DNA, 2496 bp, Homo sapiens
agctgttaagtcactctgatctctgactgcagctcctactgttggacacacctggccggtgcttcagttagatcaaaccattgctgaaactgaagaggacatgtcaaatattacagatccacagatgtgggattttgatgatctaaatttcactggcatgccacctgcagatgaagattacagcccctgtatgctagaaactgagacactcaacaagtatgttgtgatcatcgcctatgccctagtgttcctgctgagcctgctgggaaactccctggtgatgctggtcatcttatacagcagggtcggccgctccgtcactgatgtctacctgctgaacctggccttggccgacctactctttgccctgaccttgcccatctgggccgcctccaaggtgaatggctggatttttggcacattcctgtgcaaggtggtctcactcctgaaggaagtcaacttctacagtggcatcctgctgttggcctgcatcagtgtggaccgttacctggccattgtccatgccacacgcacactgacccagaagcgtcacttggtcaagtttgtttgtcttggctgctggggactgtctatgaatctgtccctgcccttcttccttttccgccaggcttaccatccaaacaattccagtccagtttgctatgaggtcctgggaaatgacacagcaaaatggcggatggtgttgcggatcctgcctcacacctttggcttcatcgtgccgctgtttgtcatgctgttctgctatggattcaccctgcgtacactgtttaaggcccacatggggcagaagcaccgagccatgagggtcatctttgctgtcgtcctcatcttcctgctttgctggctgccctacaacctggtcctgctggcagacaccctcatgaggacccaggtgatccaggagagctgtgagcgccgcaacaacatcggccgggccctggatgccactgagattctgggatttctccatagctgcctcaaccccatcatctacgccttcatcggccaaaattttcgccatggattcctcaagatcctggctatgcatggcctggtcagcaaggagttcttggcacgtcatcgtgttacctcctacacttcttcgtctgtcaatgtctcttccaacctctgaaaaccatcgatgaaggaatatctcttctcagaaggaaagaataaccaacaccctgaggttgtgtgtggaaggtgatctggctctggacaggcactatctgggttttggggggacgctataggatgtggggaagttaggaactggtgtcttcaggggccacaccaaccttctgaggagctgttgaggtacctccaaggaccggcctttgcacctccatggaaacgaagcaccatcattcccgttgaacgtcacatctttaacccactaactggctaattagcatggccacatctgagccccgaatctgacattagatgagagaacagggctgaagctgtgtcctcatgagggctggatgctctcgttgaccctcacaggagcatctcctcaactctgagtgttaagcgttgagccaccaagctggtggctctgtgtgctctgatccgagctcaggggggtggttttcccatctcaggtgtgttgcagtgtctgctggagacattgaggcaggcactgccaaaacatcaacctgccagctggccttgtgaggagctggaaacacatgttccccttgggggtggtggatgaacaaagagaaagagggtttggaagccagatctatgccacaagaaccccctttacccccatgaccaacatcgcagacacatgtgctggccacctgctgagccccaagtggaacgagacaagcagcccttagcccttcccctctgcagcttccaggctggcgtgcagcatcagcatccctagaaagccatgtgcagccaccagtccattgggcaggcagatgttcctaataaagcttctgttccgtgcttgtccctgtggaagtatcttggttgtgacagagtcaagggtgtgtgcagcattgttggctgttcctgcagtagaatgggggcagcacctcctaagaaggcacctctctgggttgaagggcagtgttccctggggctttaactcctgctagaacagtctcttgaggcacagaaactcctgttcatgcccatacccctggccaaggaagatccctttgtccacaagtaaaaggaaatcctcctccagggagtctcagcttcaccctgaggtgagcatcatcttctgggttaggccttgcctaggcatagcctgcctcaagctatgtgagctcaccagtccctccccaaatgctttccatgagttgcagttttttcctagtctgttttccctccttggagaacagggccctgtcggtttgttcactgtatgtccttggtgcctggagcctactaaatgctcaataaataatgatcacaggaatgaatgcatgctgaaaagaccactctttt

SEQ ID NO: 463 - protein, 350 aa, Homo sapiens
MSNITDPQMWDFDDLNFTGMPPADEDYSPCMLETETLNKYVVIIAYALVFLLSLLGNSLVMLVILYSRVGRSVTDVYLLNLALADLLFALTLPIWAASKVNGWIFGTFLCKVVSLLKEVNFYSGILLLACISVDRYLAIVHATRTLTQKRHLVKFVCLGCWGLSMNLSLPFFLFRQAYHPNNSSPVCYEVLGNDTAKWRMVLRILPHTFGFIVPLFVMLFCYGFTLRTLFKAHMGQKHRAMRVIFAVVLIFLLCWLPYNLVLLADTLMRTQVIQESCERRNNIGRALDATEILGFLHSCLNPIIYAFIGQNFRHGFLKILAMHGLVSKEFLARHRVTSYTSSSVNVSSNL

SEQ ID NO: 464 - DNA, 1135 bp, Homo sapiens
cctgaggcctcctcatggatgggtcaaacgtgacatcatttgttgttgaggaacccacgaacatctcaactggcaggaacgcctcagtcgggaatgcacatcggcaaatccccatcgtgcactgggtcattatgagcatctccccagtggggtttgttgagaatgggattctcctctggttcctgtgcttccggatgagaagaaatcccttcactgtctacatcacccacctgtctatcgcagacatctcactgctcttctgtattttcatcttgtctatcgactatgctttagattatgagctttcttctggccattactacacaattgtcacattatcagtgacttttctgtttggctacaacacgggcctctatctgctgacggccattagtgtggagaggtgcctgtcagtcctttaccccatctggtaccgatgccatcgccccaagtaccagtcggcattggtctgtgcccttctgtgggctctttcttgcttggtgaccaccatggagtatgtcatgtgcatcgacagagaagaagagagtcactctcggaatgactgccgagcagtcatcatctttatagccatcctgagcttcctggtcttcacgcccctcatgctggtgtccagcaccatcttggtcgtgaagatccggaagaacacgtgggcttcccattcctccaagctttacatagtcatcatggtcaccatcattatattcctcatcttcgctatgcccatgagactcctttacctgctgtactatgagtattggtcgacctttgggaacctacaccacatttccctgctcttctccacaatcaacagtagcgccaaccctttcatttacttctttgtgggaagcagtaagaagaagagattcaaggagtccttaaaagttgttctgaccagggctttcaaagatgaaatgcaacctcggcgccagaaagacaattgtaatacggtcacagttgagactgtcgtctaagaactgtgagggaagttgtggataaaaatggtggaacacaggtcatttttagtttgtgcttggaatatgacttaagtatctcctaaatgtgatacagaagaacatctcatcccatatgcatgagatactaattaatgatgaaa

SEQ ID NO: 465 - protein, 325 aa, Homo sapiens
MDGSNVTSFVVEEPTNISTGRNASVGNAHRQIPIVHWVIMSISPVGFVENGILLWFLCFRMRRNPFTVYITHLSIADISLLFCIFILSIDYALDYELSSGHYYTIVTLSVTFLFGYNTGLYLLTAISVERCLSVLYPIWYRCHRPKYQSALVCALLWALSCLVTTMEYVMCIDREEESHSRNDCRAVIIFIAILSFLVFTPLMLVSSTILVVKIRKNTWASHSSKLYIVIMVTIIIFLIFAMPMRLLYLLYYEYWSTFGNLHHISLLFSTINSSANPFIYFFVGSSKKKRFKESLKVVLTRAFKDEMQPRRQKDNCNTVTVETVV

SEQ ID NO: 466 - DNA, 993 bp, Homo sapiens
atgctgccggactggaagagctccttgatcctcatggcttacatcatcatcttcctcactggcctccctgccaacctcctggccctgcgggcctttgtggggcggatccgccagccccagcctgcacctgtgcacatcctcctgctgagcctgacgctggccgacctcctcctgctgctgctgctgcccttcaagatcatcgaggctgcgtcgaacttccgctggtacctgcccaaggtcgtctgcgccctcacgagttttggcttctacagcagcatctactgcagcacgtggctcctggcgggcatcagcatcgagcgctacctgggagtggctttccccgtgcagtacaagctctcccgccggcctctgtatggagtgattgcagctctggtggcctgggttatgtcctttggtcactgcaccatcgtgatcatcgttcaatacttgaacacgactgagcaggtcagaagtggcaatgaaattacctgctacgagaacttcaccgataaccagttggacgtggtgctgcccgtgcggctggagctgtgcctggtgctcttcttcatccccatggcagtcaccatcttctgctactggcgttttgtgtggatcatgctctcccagccccttgtgggggcccagaggcggcgccgagccgtggggctggctgtggtgacgctgctcaatttcctggtgtgcttcggaccttacaacgtgtcccacctggtggggtatcaccagagaaaaagcccctggtggcggtcaatagccgtggtgttcagttcactcaacgccagtctggaccccctgctcttctatttctcttcttcagtggtgcgcagggcatttgggagagggctgcaggtgctgcggaatcagggctcctccctgttgggacgcagaggcaaagacacagcagaggggacaaatgaggacaggggtgtgggtcaaggagaagggatgccaagttcggacttcactacagagtag

SEQ ID NO: 467 - protein, 330 aa, Homo sapiens
MLPDWKSSLILMAYIIIFLTGLPANLLALRAFVGRIRQPQPAPVHILLLSLTLADLLLLLLLPFKIIEAASNFRWYLPKVVCALTSFGFYSSIYCSTWLLAGISIERYLGVAFPVQYKLSRRPLYGVIAALVAWVMSFGHCTIVIIVQYLNTTEQVRSGNEITCYENFTDNQLDVVLPVRLELCLVLFFIPMAVTIFCYWRFVWIMLSQPLVGAQRRRRAVGLAVVTLLNFLVCFGPYNVSHLVGYHQRKSPWWRSIAVVFSSLNASLDPLLFYFSSSVVRRAFGRGLQVLRNQGSSLLGRRGKDTAEGTNEDRGVGQGEGMPSSDFTTE

SEQ ID NO: 468 - DNA, 2771 bp, Homo sapiens
ggccacaggccagcgccactctgccaggctcccggccatcgcccgcctggtgcgccgcccgccagctctttgcccgcgcggggccgcccgccgcgggctcagggcagaccatgcgcccgccaagtccgctgcccgcccgctggctatgcgtgctggcaggcgccctcgcctgggcccttgggccggcgggcggccaggcggccaggctgcaggaggagtgtgactatgtgcagatgatcgaggtgcagcacaagcagtgcctggaggaggcccagctggagaatgagacaataggctgcagcaagatgtgggacaacctcacctgctggccagccacccctcggggccaggtagttgtcttggcctgtcccctcatcttcaagctcttctcctccattcaaggccgcaatgtaagccgcagctgcaccgacgaaggctggacgcacctggagcctggcccgtaccccattgcctgtggtttggatgacaaggcagcgagtttggatgagcagcagaccatgttctacggttctgtgaagaccggctacaccattggctacggcctgtccctcgccacccttctggtcgccacagctatcctgagcctgttcaggaagctccactgcacgcggaactacatccacatgcacctcttcatatccttcatcctgagggctgccgctgtcttcatcaaagacttggccctcttcgacagcggggagtcggaccagtgctccgagggctcggtgggctgtaaggcagccatggtctttttccaatattgtgtcatggctaacttcttctggctgctggtggagggcctctacctgtacaccctgcttgccgtctccttcttctctgagcggaagtacttctgggggtacatactcatcggctggggggtacccagcacattcaccatggtgtggaccatcgccaggatccattttgaggattatgggtgctgggacaccatcaactcctcactgtggtggatcataaagggccccatcctcacctccatcttggtaaacttcatcctgtttatttgcatcatccgaatcctgcttcagaaactgcggcccccagatatcaggaagagtgacagcagtccatactcaaggctagccaggtccacactcctgctgatccccctgtttggagtacactacatcatgttcgccttctttccggacaattttaagcctgaagtgaagatggtctttgagctcgtcgtggggtctttccagggttttgtggtggctatcctctactgcttcctcaatggtgaggtgcaggcggagctgaggcggaagtggcggcgctggcacctgcagggcgtcctgggctggaaccccaaataccggcacccgtcgggaggcagcaacggcgccacgtgcagcacgcaggtttccatgctgacccgcgtcagcccaggtgcccgccgctcctccagcttccaagccgaagtctccctggtctgaccaccaggatcccaggggcccaaggcggcccctcccgccccttcccactcaccccggcagacgccggggacagaggcctgcccgggcgcggccagccccggccctgggctcggaggctgcccccggccccctggtctctggtccggacactcctagagaacgcagccctagagcctgcctggagcgtttctagcaagtgagagagatgggagctcctctcctggaggattgcaggtggaactcagtcattagactcctcctccaaaggccccctacgccaatcaagggcaaaaagtctacatactttcatcctgactctgccccctgctggctcttctgcccaattggaggaaagcaaccggtggatcctcaaacaacactggtgtgacctgagggcagaaaggttctgcccggggaaggtcaccagcaccaacaccacggtagtgcctgaaatttcaccattgctgtcaagttcctttgggttaagcattaccactcaggcatttgactgaagatgcagctcactaccctattctctctttacgcttagttatcagctttttaaagtgggttattctggagtttttgtttggagagcacacctatcttagtggttccccaccgaagtggactggcccctgggtcagtctggtgggaggacggtgcaacccaaggactgagggactctgaagcctctgggaaatgagaaggcagccaccagcgaatgctaggtctcggactaagcctacctgctctccaagtctcagtggcttcatctgtcaagtgggatctgtcacaccagccatacttatctctctgtgctgtggaagcaacaggaatcaagagctgccctccttgtccacccacctatgtgccaactgttgtaactaggctcagagatgtgcacccatgggctctgacagaaagcagatacctcaccctgctacacatacaggatttgaactcagatctgtctgataggaatgtgaaagcacggactcttactgctaacttttgtgtatcgtaaccagccagatcctcttggttatttgtttaccacttgtattattaatgccattatcctgaattccccttgccaccccaccctccctggcgtgtggctgaggaggcctccatctcatgtatcatctggataggagcctgctggtcacagcctcctctgtctgcccttcaccccagtggccactcagcttcctacccacacctctgccagaagatcccctcaggactgcaacaggcttgtgcaacaataaatgttggcttgga

SEQ ID NO: 469 - protein, 457 aa, Homo sapiens
MRPPSPLPARWLCVLAGALAWALGPAGGQAARLQEECDYVQMIEVQHKQCLEEAQLENETIGCSKMWDNLTCWPATPRGQVVVLACPLIFKLFSSIQGRNVSRSCTDEGWTHLEPGPYPIACGLDDKAASLDEQQTMFYGSVKTGYTIGYGLSLATLLVATAILSLFRKLHCTRNYIHMHLFISFILRAAAVFIKDLALFDSGESDQCSEGSVGCKAAMVFFQYCVMANFFWLLVEGLYLYTLLAVSFFSERKYFWGYILIGWGVPSTFTMVWTIARIHFEDYGCWDTINSSLWWIIKGPILTSILVNFILFICIIRILLQKLRPPDIRKSDSSPYSRLARSTLLLIPLFGVHYIMFAFFPDNFKPEVKMVFELVVGSFQGFVVAILYCFLNGEVQAELRRKWRRWHLQGVLGWNPKYRHPSGGSNGATCSTQVSMLTRVSPGARRSSSFQAEVSLV

SEQ ID NO: 470 - DNA, 1640 bp, Homo sapiens
cgggacgagggggcggcccccgcgctcggggcgctcggctacagctgcggggcccgaggtctccgcgcactcgctcccggcccatgctggaggcggcggaacccgggggacctaggacggaggcggcgggcgctgggcggcccccggcacgctgagctcgggatgcggacgctgctgcctcccgcgctgctgacctgctggctgctcgcccccgtgaacagcattcacccagaatgccgatttcatctggaaatacaggaggaagaaacaaaatgtacagagcttctgaggtctcaaacagaaaaacacaaagcctgcagtggcgtctgggacaacatcacgtgctggcggcctgccaatgtgggagagaccgtcacggtgccctgcccaaaagtcttcagcaatttttacagcaaagcaggaaacataagcaaaaactgtacgagtgacggatggtcagagacgttcccagatttcgtcgatgcctgtggctacagcgacccggaggatgagagcaagatcacgttttatattctggtgaaggccatttataccctgggctacagtgtctctctgatgtctcttgcaacaggaagcataattctgtgcctcttcaggaagctgcactgcaccaggaattacatccacctgaacctgttcctgtccttcatcctgagagccatctcagtgctggtcaaggacgacgttctctactccagctctggcacgttgcactgccctgaccagccatcctcctgggtgggctgcaagctgagcctggtcttcctgcagtactgcatcatggccaacttcttctggctgctggtggaggggctctacctccacaccctcctggtggccatgctcccccctagaaggtgcttcctggcctacctcctgatcggatggggcctccccaccgtctgcatcggtgcatggactgcggccaggctctacttagaagacaccggttgctgggatacaaacgaccacagtgtgccctggtgggtcatacgaataccgattttaatttccatcatcgtcaattttgtccttttcattagtattatacgaattttgctgcagaagttaacatccccagatgtcggcggcaacgaccagtctcagtacaagaggctggccaagtccacgctcctgcttatcccgctgttcggcgtccactacatggtgtttgccgtgtttcccatcagcatctcctccaaataccagatactgtttgagctgtgcctcgggtcgttccagggcctggtggtggccgtcctctactgtttcctgaacagtgaggtgcagtgcgagctgaagcgaaaatggcgaagccggtgcccgaccccgtccgcgagccgggattacagggtctgcggttcctccttctcccacaacggctcggagggcgccctgcagttccaccgcgcgtcccgagcccagtccttcctgcaaacggagacctcggtcatctagccccacccctgcctgtcggacgcggcgggaggcccacggttcggggcttctgcggggctgagacgccggcttcctccttccagatgcccgagcaccgtgtcgggcaggtcagcgcggtcctgactccgtcaagctggttgtccactaaaccccatacctgg

SEQ ID NO: 471 - protein, 438 aa, Homo sapiens
MRTLLPPALLTCWLLAPVNSIHPECRFHLEIQEEETKCTELLRSQTEKHKACSGVWDNITCWRPANVGETVTVPCPKVFSNFYSKAGNISKNCTSDGWSETFPDFVDACGYSDPEDESKITFYILVKAIYTLGYSVSLMSLATGSIILCLFRKLHCTRNYIHLNLFLSFILRAISVLVKDDVLYSSSGTLHCPDQPSSWVGCKLSLVFLQYCIMANFFWLLVEGLYLHTLLVAMLPPRRCFLAYLLIGWGLPTVCIGAWTAARLYLEDTGCWDTNDHSVPWWVIRIPILISIIVNFVLFISIIRILLQKLTSPDVGGNDQSQYKRLAKSTLLLIPLFGVHYMVFAVFPISISSKYQILFELCLGSFQGLVVAVLYCFLNSEVQCELKRKWRSRCPTPSASRDYRVCGSSFSHNGSEGALQFHRASRAQSFLQTETSVI

SEQ ID NO: 472 - DNA, 1239 bp, Homo sapiens
atgggcagcccctggaacggcagcgacggccccgagggggcgcgggagccgccgtggcccgcgctgccgccttgcgacgagcgccgctgctcgccctttcccctgggggcgctggtgccggtgaccgctgtgtgcctgtgcctgttcgtcgtcggggtgagcggcaacgtggtgaccgtgatgctgatcgggcgctaccgggacatgcggaccaccaccaacttgtacctgggcagcatggccgtgtccgacctactcatcctgctcgggctgccgttcgacctgtaccgcctctggcgctcgcggccctgggtgttcgggccgctgctctgccgcctgtccctctacgtgggcgagggctgcacctacgccacgctgctgcacatgaccgcgctcagcgtcgagcgctacctggccatctgccgcccgctccgcgcccgcgtcttggtcacccggcgccgcgtccgcgcgctcatcgctgtgctctgggccgtggcgctgctctctgccggtcccttcttgttcctggtgggcgtcgagcaggaccccggcatctccgtagtcccgggcctcaatggcaccgcgcggatcgcctcctcgcctctcgcctcgtcgccgcctctctggctctcgcgggcgccaccgccgtccccgccgtcggggcccgagaccgcggaggccgcggcgctgttcagccgcgaatgccggccgagccccgcgcagctgggcgcgctgcgtgtcatgctgtgggtcaccaccgcctacttcttcctgccctttctgtgcctcagcatcctctacgggctcatcgggcgggagctgtggagcagccggcggccgctgcgaggcccggccgcctcggggcgggagagaggccaccggcagaccgtccgcgtcctgctggtggtggttctggcatttataatttgctggttgcccttccacgttggcagaatcatttacataaacacggaagattcgcggatgatgtacttctctcagtactttaacatcgtcgctctgcaacttttctatctgagcgcatctatcaacccaatcctctacaacctcatttcaaagaagtacagagcggcggcctttaaactgctgctcgcaaggaagtccaggccgagaggcttccacagaagcagggacactgcgggggaagttgcaggggacactggaggagacacggtgggctacaccgagacaagcgctaacgtgaagacgatgggataa

SEQ ID NO: 473 - protein, 412 aa, Homo sapiens
MGSPWNGSDGPEGAREPPWPALPPCDERRCSPFPLGALVPVTAVCLCLFVVGVSGNVVTVMLIGRYRDMRTTTNLYLGSMAVSDLLILLGLPFDLYRLWRSRPWVFGPLLCRLSLYVGEGCTYATLLHMTALSVERYLAICRPLRARVLVTRRRVRALIAVLWAVALLSAGPFLFLVGVEQDPGISVVPGLNGTARIASSPLASSPPLWLSRAPPPSPPSGPETAEAAALFSRECRPSPAQLGALRVMLWVTTAYFFLPFLCLSILYGLIGRELWSSRRPLRGPAASGRERGHRQTVRVLLVVVLAFIICWLPFHVGRIIYINTEDSRMMYFSQYFNIVALQLFYLSASINPILYNLISKKYRAAAFKLLLARKSRPRGFHRSRDTAGEVAGDTGGDTVGYTETSANVKTMG

SEQ ID NO: 474 - DNA, 903 bp, Homo sapiens
atggacctgcccccgcagctctccttcggcctctatgtggccgcctttgcgctgggcttcccgctcaacgtcctggccatccgaggcgcgacggcccacgcccggctccgtctcacccctagcctggtctacgccctgaacctgggctgctccgacctgctgctgacagtctctctgcccctgaaggcggtggaggcgctagcctccggggcctggcctctgccggcctcgctgtgccccgtcttcgcggtggcccacttcttcccactctatgccggcgggggcttcctggccgccctgagtgcaggccgctacctgggagcagccttccccttgggctaccaagccttccggaggccgtgctattcctggggggtgtgcgcggccatctgggccctcgtcctgtgtcacctgggtctggtctttgggttggaggctccaggaggctggctggaccacagcaacacctccctgggcatcaacacaccggtcaacggctctccggtctgcctggaggcctgggacccggcctctgccggcccggcccgcttcagcctctctctcctgctcttttttctgcccttggccatcacagccttctgctacgtgggctgcctccgggcactggcccgctccggcctgacgcacaggcggaagctgcgggccgcctgggtggccggcggggccctcctcacgctgctgctctgcgtaggaccctacaacgcctccaacgtggccagcttcctgtaccccaatctaggaggctcctggcggaagctggggctcatcacgggtgcctggagtgtggtgcttaatccgctggtgaccggttacttgggaaggggtcctggcctgaagacagtgtgtgcggcaagaacgcaagggggcaagtcccagaagtaa

SEQ ID NO: 475 - protein, 300 aa, Homo sapiens
MDLPPQLSFGLYVAAFALGFPLNVLAIRGATAHARLRLTPSLVYALNLGCSDLLLTVSLPLKAVEALASGAWPLPASLCPVFAVAHFFPLYAGGGFLAALSAGRYLGAAFPLGYQAFRRPCYSWGVCAAIWALVLCHLGLVFGLEAPGGWLDHSNTSLGINTPVNGSPVCLEAWDPASAGPARFSLSLLLFFLPLAITAFCYVGCLRALARSGLTHRRKLRAAWVAGGALLTLLLCVGPYNASNVASFLYPNLGGSWRKLGLITGAWSVVLNPLVTGYLGRGPGLKTVCAARTQGGKSQK

SEQ ID NO: 476 - DNA, 1197 bp, Homo sapiens
atgcacaccgtggctacgtccggacccaacgcgtcctggggggcaccggccaacgcctccggctgcccgggctgtggcgccaacgcctcggacggcccagtcccttcgccgcgggccgtggacgcctggctcgtgccgctcttcttcgcggcgctgatgctgctgggcctggtggggaactcgctggtcatctacgtcatctgccgccacaagccgatgcggaccgtgaccaacttctacatcgccaacctggcggccacggacgtgaccttcctcctgtgctgcgtccccttcacggccctgctgtacccgctgcccggctgggtgctgggcgacttcatgtgcaagttcgtcaactacatccagcaggtctcggtgcaggccacgtgtgccactctgaccgccatgagtgtggaccgctggtacgtgacggtgttcccgttgcgcgccctgcaccgccgcacgccccgcctggcgctggctgtcagcctcagcatctgggtaggctctgcggcggtgtctgcgccggtgctcgccctgcaccgcctgtcacccgggccgcgcgcctactgcagtgaggccttccccagccgcgccctggagcgcgccttcgcactgtacaacctgctggcgctgtacctgctgccgctgctcgccacctgcgcctgctatgcggccatgctgcgccacctgggccgggtcgccgtgcgccccgcgcccgccgatagcgccctgcaggggcaggtgctggcagagcgcgcaggcgccgtgcgggccaaggtctcgcggctggtggcggccgtggtcctgctcttcgccgcctgctggggccccatccagctgttcctggtgctgcaggcgctgggccccgcgggctcctggcacccacgcagctacgccgcctacgcgcttaagacctgggctcactgcatgtcctacagcaactccgcgctgaacccgctgctctacgccttcctgggctcgcacttccgacaggccttccgccgcgtctgcccctgcgcgccgcgccgcccccgccgcccccgccggcccggaccctcggaccccgcagccccacacgcggagctgcaccgcctggggtcccacccggcccccgccagggcgcagaagccagggagcagtgggctggccgcgcgcgggctgtgcgtcctgggggaggacaacgcccctctctga

SEQ ID NO: 477 - protein, 398 aa, Homo sapiens
MHTVATSGPNASWGAPANASGCPGCGANASDGPVPSPRAVDAWLVPLFFAALMLLGLVGNSLVIYVICRHKPMRTVTNFYIANLAATDVTFLLCCVPFTALLYPLPGWVLGDFMCKFVNYIQQVSVQATCATLTAMSVDRWYVTVFPLRALHRRTPRLALAVSLSIWVGSAAVSAPVLALHRLSPGPRAYCSEAFPSRALERAFALYNLLALYLLPLLATCACYAAMLRHLGRVAVRPAPADSALQGQVLAERAGAVRAKVSRLVAAVVLLFAACWGPIQLFLVLQALGPAGSWHPRSYAAYALKTWAHCMSYSNSALNPLLYAFLGSHFRQAFRRVCPCAPRRPRRPRRPGPSDPAAPHAELHRLGSHPAPARAQKPGSSGLAARGLCVLGEDNAPL

SEQ ID NO: 478 - DNA, 461 bp, Homo sapiens
ccggcgccacgtgcctgctgctgcgcgcctacgtgacgcggcattgtcatgcactggctgacctatcatgagaccctgctgctgctcacactgtatggaacccacatctgcctacactgccacctggtaccaactgctctacttcttctatgatgtcatctgactgctgctacatgctagactgcgctattcaccggatccttgacaactttatcagccagactgccgggggcggctgcgatgctgtggtccattacttgctaaggaccagaccgcgggggcacatgcgcctcctcttccttctgtgacacccagcgttacataatcattaccacgggtgatagccagactgctgcgagcaacccgccaccctgcagccaagcctgagctttcaggcacaccattcgctcgcaaagacttgcgccatgtgtcccactcagtgtcttacacccagctgaggt

SEQ ID NO: 479 - DNA, 1313 bp, Homo sapiens
cagcctcctcacagctccccatagcctggacctgccggccctccctccaggaccgaggggctcccaagggaaactcaggcgtgtgctggtcccaatgtcagtgaaacccagctgggggcctggcccctcggagggggtcaccgcagtgcctaccagtgaccttggagagatccacaactggaccgagctgcttgacctcttcaaccacactttgtctgagtgccacgtggagctcagccagagcaccaagcgcgtggtcctctttgccctctacctggccatgtttgtggttgggctggtggagaacctcctggtgatatgcgtcaactggcgcggctcaggccgggcagggctgatgaacctctacatcctcaacatggccatcgcggacctgggcattgtcctgtctctgcccgtgtggatgctggaggtcacgctggactacacctggctctggggcagcttctcctgccgcttcactcactacttctactttgtcaacatgtatagcagcatcttcttcctggtgtgcctcagtgtcgaccgctatgtcaccctcaccagcgcctccccctcctggcagcgttaccagcaccgagtgcggcgggccatgtgtgcaggcatctgggtcctctcggccatcatcccgctgcctgaggtggtccacatccagctggtggagggccctgagcccatgtgcctcttcatggcaccttttgaaacgtacagcacctgggccctggcggtggccctgtccaccaccatcctgggcttcctgctgcccttccctctcatcacagtcttcaatgtgctgacagcctgccggctgcggcagccaggacaacccaagagccggcgccactgcttgctgctgtgcgcctacgtggccgtctttgtcatgtgctggctgccctatcatgtgaccctgctgctgctcacactgcatgggacccacatctccctccactgccacctggtccacctgctctacttcttctatgatgtcattgactgcttctccatgctgcactgtgtcatcaaccccatcctttacaactttctcagcccacacttccggggccggctcctgaatgctgtagtccattaccttcctaaggaccagaccaaggcgggcacatgcgcctcctcttcctcctgttccacccagcattccatcatcatcaccaagggtgatagccagcctgctgcagcagccccccaccctgagccaagcctgagctttcaggcacaccatttgcttccaaatacttcccccatctctcccactcagcctcttacacccagctgaggta

SEQ ID NO: 480 - protein, 404 aa, Homo sapiens
MSVKPSWGPGPSEGVTAVPTSDLGEIHNWTELLDLFNHTLSECHVELSQSTKRVVLFALYLAMFVVGLVENLLVICVNWRGSGRAGLMNLYILNMAIADLGIVLSLPVWMLEVTLDYTWLWGSFSCRFTHYFYFVNMYSSIFFLVCLSVDRYVTLTSASPSWQRYQHRVRRAMCAGIWVLSAIIPLPEVVHIQLVEGPEPMCLFMAPFETYSTWALAVALSTTILGFLLPFPLITVFNVLTACRLRQPGQPKSRRHCLLLCAYVAVFVMCWLPYHVTLLLLTLHGTHISLHCHLVHLLYFFYDVIDCFSMLHCVINPILYNFLSPHFRGRLLNAVVHYLPKDQTKAGTCASSSSCSTQHSIIITKGDSQPAAAAPHPEPSLSFQAHHLLPNTSPISPTQPLTPS

SEQ ID NO: 481 - DNA, 2153 bp, Homo sapiens
atgcgggttctgcttccaaagccatctcttccagcaggagagggctctactctgagctcctattttccaaggctccgggccgcgctcggcgctggcctgctgccccggcgggtccgccggccggaggcgggagtcacaggaagagccctccacaaaaggaggcctcggcggatcaggacagctgcaggtgggtgtgcagactggtgagctgccagcaggggcccagacgcgccaggcctggagatggctggaaactgctcctgggaggcccatcccggcaacaggaacaggatgtgccctggcctgagcgaggccccggaactctacagccggggcttcctgaccatcgagcagatcgcgatgctgccgcctccggccgtcatgaactacatcttcctgctcctctgcctgtgtggcctggtgggcaacgggctggtcctctggtttttcggcttctccatcaagaggaaccccttctccatctacttcctgcacctggccagcgccgatgtgggctacctcttcagcaaggcggtgttctccatcctgaacacggggggcttcctgggcacgtttgccgactacatccgcagcgtgtgccgggtcctggggctctgcatgttccttaccggcgtgagcctcctgccggccgtcagcgccgagcgctgcgcctcggtcatcttccccgcctggtactggcgccggcggcccaagcgcctgtcggccgtggtgtgcgccctgctgtgggtcctgtccctcctggtcacctgcctgcacaactacttctgcgtgttcctgggccgcggggcccccggcgcggcctgcaggcacatggacatcttcctgggcatcctcctgttcctgctctgctgcccgctcatggtgctgccctgcctggccctcatcctgcacgtggagtgccgggcccgacggcgccagcgctctgccaagctcaaccacgtcatcctggccatggtctccgtcttcctggtgtcctccatctacttagggatcgactggttcctcttctgggtcttccagatcccggcccccttccccgagtacgtcactgacctgtgcatctgcatcaacagcagcgccaagcccatcgtctacttcctggccgggagggacaagtcgcagcggctgtgggagccgctcagggtggtcttccagcgggccctgcgggacggcgctgagctgggggaggccgggggcagcacgcccaacacagtcaccatggagatgcagtgtcccccggggaacgcctcctgagactccagcgcctggaggaggcaggggcaggaagcggcctccaagacccttcgccttgggacaggaatgggcacctgcttctgagtccatacaggagaagaaagatctgtttcctctcctcgggcctccttctccctgggctggggactccaggggtggctgggagactgggcagccaccagcaaacagacctgtggcccctgcccggctcccccacccattctgctcccctagagacctcttgtacagaagttgcccccaggtggtggggcccctccttgccctaggctggttggtaaaagagaggaggtcaacacccagcctagccacctctgcctcttgggtcagccctccttgactgtgtcccagccagcaccaggccagcagcctcatccctgccattcagggctgttccagagattcgatcctcttaaggcattatcagtgagcaaatgtgaaggaaatggtgtctggaagaaagttctggttcacatgccttgtagctaagtctttctgcaaacaacctcccttccccccgtcgagtcatttggtgactttgatggggggatttctggttatgtcaaggctctggagacaggaagggcctttggccgccttgggtagttgacctgccttttctgactccgggacgagccagtcctaggctgcctccgggagcacttgaggtatcccgcaggccatgaggacccactgggcagctcctggacagcctcttggctccagcccccacccgaaagtggacactggctccgccctggccacctggggactggcactgtggtgcacagtggcccaatgtggccaacggaagttttataaaagacaaaatgtatatcaataaacattttataacttgc

SEQ ID NO: 482 - protein, 343 aa, Homo sapiens
MAGNCSWEAHPGNRNRMCPGLSEAPELYSRGFLTIEQIAMLPPPAVMNYIFLLLCLCGLVGNGLVLWFFGFSIKRNPFSIYFLHLASADVGYLFSKAVFSILNTGGFLGTFADYIRSVCRVLGLCMFLTGVSLLPAVSAERCASVIFPAWYWRRRPKRLSAVVCALLWVLSLLVTCLHNYFCVFLGRGAPGAACRHMDIFLGILLFLLCCPLMVLPCLALILHVECRARRRQRSAKLNHVILAMVSVFLVSSIYLGIDWFLFWVFQIPAPFPEYVTDLCICINSSAKPIVYFLAGRDKSQRLWEPLRVVFQRALRDGAELGEAGGSTPNTVTMEMQCPPGNAS

SEQ ID NO: 483 - DNA, 1071 bp, Homo sapiens
atgaatggggtctcggaggggaccagaggctgcagtgacaggcaacctggggtcctgacacgtgatcgctcttgttccaggaagatgaactcttccggatgcctgtctgaggaggtggggtccctccgcccactgactgtggttatcctgtctgcgtccattgtcgtcggagtgctgggcaatgggctggtgctgtggatgactgtcttccgtatggcacgcacggtctccaccgtctgcttcttccacctggcccttgccgatttcatgctctcactgtctctgcccattgccatgtactatattgtctccaggcagtggctcctcggagagtgggcctgcaaactctacatcacctttgtgttcctcagctactttgccagtaactgcctccttgtcttcatctctgtggaccgttgcatctctgtcctctaccccgtctgggccctgaaccaccgcactgtgcagcgggcgagctggctggcctttggggtgtggctcctggccgccgccttgtgctctgcgcacctgaaattccggacaaccagaaaatggaatggctgtacgcactgctacttggcgttcaactctgacaatgagactgcccagatttggattgaaggggtcgtggagggacacattatagggaccattggccacttcctgctgggcttcctggggcccttagcaatcataggcacctgcgcccacctcatccgggccaagctcttgcgggagggctgggtccatgccaaccggcccaagaggctgctgctggtgctggtgagcgctttctttatcttctggtccccgtttaacgtggtgctgttggtccatctgtggcgacgggtgatgctcaaggaaatctaccacccccggatgctgctcatcctccaggctagctttgccttgggctgtgtcaacagcagcctcaaccccttcctctacgtcttcgttggcagagatttccaagaaaagtttttccagtctttgacttctgccctggcgagggcgtttggagaggaggagtttctgtcatcctgtccccgtggcaacgccccccgggaatga

SEQ ID NO: 484 - protein, 356 aa, Homo sapiens
MNGVSEGTRGCSDRQPGVLTRDRSCSRKMNSSGCLSEEVGSLRPLTVVILSASIVVGVLGNGLVLWMTVFRMARTVSTVCFFHLALADFMLSLSLPIAMYYIVSRQWLLGEWACKLYITFVFLSYFASNCLLVFISVDRCISVLYPVWALNHRTVQRASWLAFGVWLLAAALCSAHLKFRTTRKWNGCTHCYLAFNSDNETAQIWIEGVVEGHIIGTIGHFLLGFLGPLAIIGTCAHLIRAKLLREGWVHANRPKRLLLVLVSAFFIFWSPFNVVLLVHLWRRVMLKEIYHPRMLLILQASFALGCVNSSLNPFLYVFVGRDFQEKFFQSLTSALARAFGEEEFLSSCPRGNAPRE

SEQ ID NO: 485 - DNA, 2901 bp, Homo sapiens
cagcctccctctcccacctctgtctgcccgctgcctcttgtctagctgctgtcaggagctgactgcctccagggctggaatcctgtgctccctctgtgcccagagccccacgatgtcggccaacgccacactgaagccactctgccccatcctggagcagatgagccgtctccagagccacagcaacaccagcatccgctacatcgaccacgcggccgtgctgctgcacgggctggcctcgctgctgggcctggtggagaatggagtcatcctcttcgtggtgggctgccgcatgcgccagaccgtggtcaccacctgggtgctgcacctggcgctgtccgacctgttggcctctgcttccctgcccttcttcacctacttcttggccgtgggccactcgtgggagctgggcaccaccttctgcaaactgcactcctccatcttctttctcaacatgttcgccagcggcttcctgctcagcgccatcagcctggaccgctgcctgcaggtggtgcggccggtgtgggcgcagaaccaccgcaccgtggccgcggcgcacaaagtctgcctggtgctttgggcactagcggtgctcaacacggtgccctatttcgtgttccgggacaccatctcgcggctggacgggcgcattatgtgctactacaatgtgctgctcctgaacccggggcctgaccgcgatgccacgtgcaactcgcgccaggcggccctggccgtcagcaagttcctgctggccttcctggtgccgctggcgatcatcgcctcgagccacgcggccgtgagcctgcggttgcagcaccgcggccgccggcggccaggccgcttcgtgcgcctggtggcagccgtcgtggccgccttcgcgctctgctgggggccctaccacgtgttcagcctgctggaggcgcgggcgcacgcaaacccggggctgcggccgctcgtgtggcgcgggctgcccttcgtcaccagcctggccttcttcaacagcgtggccaacccggtgctctacgtgctcacctgccccgacatgctgcgcaagctgcggcgctcgctgcgcacggtgctggagagcgtgctggtggacgacagcgagctgggtggcgcgggaagcagccgccgccgccgcacctcctccaccgcccgctcggcctcccctttagctctctgcagccgcccggaggaaccgcggggccccgcgcgtctcctcggctggctgctgggcagctgcgcagcgtccccgcagacgggccccctgaaccgggcgctgagcagcacctcgagttagaacccggcccacgtagggcggcactcacacgcgaaagtatcaccagggtgccgcggttcaattcgatatccggactcctgccgcagtgatcaaagtccgaggggcgggacccaggcacctgcattttaaagcgccccgggagactctgaatctttttcagaaacagtgagttaaagcagtgcttctcaaaccttgatgtgcctgtgaatcacctaggggtcttgttaagtgcagtctgatccaggaggccggggccgggtactgagagtctgcacttaacaagctcccaggccgagaagccagtgcggcaggttcacaggcgaggcctggagtaacacaaagtgaaactcgtaatagacttcccactctagggcagtggagtcggaagggcacacggggtgcgtctccccggagttcagttttaccagatgatgggggaggggggaaggagttttatgttaaaccatccatgtatttttggagaagagagaggaaaggtttgagaagcactgttccagcctgccctcttcatttagccaatgcttactgcgctagacgcttcatcccacaatcttaaggggcagcttctattagccagtctttacagctgagcacattctggctcagggaggttaagtgacttgcccagtttcagggctaacgaccacagggtctgcactctaaccctaggcatcacatgctcaatgactctctggtgagcgaggacattctctgacctactcgagggacttaagatgctaccttgtgacccagcactgcccaaagtgcttccaaggcagaagcagcaggggatggcgtggtcaagcactcgggaaacctggggctaatcaaatccaatgggggaaatgactaaaagtcttcggtcgttagaagttgaatgggcacagcaactctaagactacagcacacgtcatttcttagctaagcggaccagcctccctgtcggcctggtgttctgtgggatccctctgggcactggtaatcccaagatctgtgcagccccgcctccaggccacatggggctgggcagctaccatttcccttttgcggatgggaggggtaacttgcacctctgacctatcacttccactgcaccccgtctcattcctccacctgccgtggacttggggtcagagactgctgtgtttgagctctgcagcccagggaccgaaaagttggtgtcaatgaattttgcttggtggatgaaatgtcagtggaagaagcagatgagaaactcttgagatcttggtcctgtgttttttctgccaccaaaggccagggtcactgaaggcctggcccacagcaggtgctgagcaaagggaacagtgaggtgcccagctagctgcagagccaccctgtgttgacacctcgcccctgctccctcccatcccttccccctttactcatagcacttcccccattggacacgtggtgcattttgcttgtttattatgttttctctccatcagaatgaaagctcctcgagggcagggactttggtctattgtctgtatttgccggtgcctaggattgtgcctgtatgcaacaggcactcaataaatatttttgctgtagactgg

SEQ ID NO: 486 - protein, 395 aa, Homo sapiens
MSANATLKPLCPILEQMSRLQSHSNTSIRYIDHAAVLLHGLASLLGLVENGVILFVVGCRMRQTVVTTWVLHLALSDLLASASLPFFTYFLAVGHSWELGTTFCKLHSSIFFLNMFASGFLLSAISLDRCLQVVRPVWAQNHRTVAAAHKVCLVLWALAVLNTVPYFVFRDTISRLDGRIMCYYNVLLLNPGPDRDATCNSRQAALAVSKFLLAFLVPLAIIASSHAAVSLRLQHRGRRRPGRFVRLVAAVVAAFALCWGPYHVFSLLEARAHANPGLRPLVWRGLPFVTSLAFFNSVANPVLYVLTCPDMLRKLRRSLRTVLESVLVDDSELGGAGSSRRRRTSSTARSASPLALCSRPEEPRGPARLLGWLLGSCAASPQTGPLNRALSSTSS

SEQ ID NO: 487 - DNA, 1086 bp, Homo sapiens
atgaatgaatccaggtggactgaatggaggatcctgaacatgagcagtggcattgtgaatgcgtccgagcgtcactcctgcccacttggatttggccactacagtgtggtggatgtctgcatcttcgagacagtggttattgtgttgctgacatttctgattattgctgggaatctaacagttatctttgcctttcattgtgctccactgttacatcattatactaccagctatttcattcagacgatggcatatgctgatcttttcgttggagttagctgcttggttcctactctgtcacttctccactactccacaggtgtccacgagtcattaacttgccgggtttttggatatatcatctcagttctaaaaagtgtttctatggcatgtcttgcttgcatcagtgtggatcgttatcttgcaataaccaagcctctttcctacaatcaactggtcaccccttgtcgcttgagaatttgcattattttgatctggatctactcctgcctaattttcttgccttccttttttggctgggggaaacctggttaccatggtgacatttttgaatggtgtgccacgtcttggctcaccagtgcctattttactggctttattgtttgcttactttatgctcctgctgcctttgttgtctgcttcacctacttccacattttcaaaatttgccgtcagcacaccaaagagataaatgaccgaagagcccgattccctagtcatgaggtagattcttccagagagactggacacagccctgaccgtcgctacgccatggttttgtttaggataaccagtgtattttatatgctgtggctcccctatataatttactttcttctagaaagctcccgggtcttggacaatccaactctgtccttcttaacaacctggcttgcagtaagtaatagtttttgtaactgtgtaatatacagcctctccaacggcgttttccggctaggcctccgaagactgtttgagacaatgtgcacatcctgtatgtgtgtgaaggatcaggaagcacaagaacccaaacctaggaaacgggctaattcttgctccatttga

SEQ ID NO: 488 - protein, 361 aa, Homo sapiens
MNESRWTEWRILNMSSGIVNASERHSCPLGFGHYSVVDVCIFETVVIVLLTFLIIAGNLTVIFAFHCAPLLHHYTTSYFIQTMAYADLFVGVSCLVPTLSLLHYSTGVHESLTCRVFGYIISVLKSVSMACLACISVDRYLAITKPLSYNQLVTPCRLRICIILIWIYSCLIFLPSFFGWGKPGYHGDIFEWCATSWLTSAYFTGFIVCLLYAPAAFVVCFTYFHIFKICRQHTKEINDRRARFPSHEVDSSRETGHSPDRRYAMVLFRITSVFYMLWLPYIIYFLLESSRVLDNPTLSFLTTWLAVSNSFCNCVIYSLSNGVFRLGLRRLFETMCTSCMCVKDQEAQEPKPRKRANSCSI

SEQ ID NO: 489 - DNA, 960 bp, Homo sapiens
atgagtcagcaaaacaccagtggggactgcctgtttgacggtgtcaacgagctgatgaaaaccctacagtttgcagtccacatccccaccttcgtcctgggcctgctcctcaacctgctggccatccatggcttcagcaccttccttaagaacaggtggcccgattatgctgccacctccatctacatgatcaacctggcagtctttgacctgctgctggtgctctccctcccattcaagatggtcctgtcccaggtacagtcccccttcccgtccctgtgcaccctggtggagtgcctttacttcgtcagcatgtacggaagcgtcttcaccatctgcttcatcagcatggaccggttcttggccatccgttacccgctactggtgagccactccggtcccccaggaagatctttgggatctgcatgcacaatctgggtcctggtgtggaccggaagcatccctatctacagtttccatgggaaagtggaaaaatacatgtgcttccacaacatgtctgatgatacctggagcgccaaggtcttcttcccgctggaggtgtttggcttcctccttcccatgggcatcatgggcttctgctgctccaggagcatccacatcctgctgggccgccgagaccacacccaggactgggtgcagcagaaagcctgcatctacagcatcgcagccagcctggctgtattcgtggtctccttcctcccagtccacctggggttcttcctgcagttcctggtgagaaacagctttatcgtagagtgcagagccaagcagagcatcagcttcttcttgcaattgtccatgtgtttctccaatgtcaactgctgcctggatgttttctgctactactttgtcatcaaagaattccgcatgaacatcagggcccaccggccttccagggtccagctggtcctgcaggacaccacgatctcccggggctaa

SEQ ID NO: 490 - protein, 319 aa, Homo sapiens
MSQQNTSGDCLFDGVNELMKTLQFAVHIPTFVLGLLLNLLAIHGFSTFLKNRWPDYAATSIYMINLAVFDLLLVLSLPFKMVLSQVQSPFPSLCTLVECLYFVSMYGSVFTICFISMDRFLAIRYPLLVSHSGPPGRSLGSACTIWVLVWTGSIPIYSFHGKVEKYMCFHNMSDDTWSAKVFFPLEVFGFLLPMGIMGFCCSRSIHILLGRRDHTQDWVQQKACIYSIAASLAVFVVSFLPVHLGFFLQFLVRNSFIVECRAKQSISFFLQLSMCFSNVNCCLDVFCYYFVIKEFRMNIRAHRPSRVQLVLQDTTISRG

SEQ ID NO: 491 - DNA, 930 bp, Homo sapiens
atgaatggcacctacaacacctgtggctccagcgacctcacctggcccccagcgatcaagctgggcttctacgcctacttgggcgtcctgctggtgctaggcctgctgctcaacagcctggcgctctgggtgttctgctgccgcatgcagcagtggacggagacccgcatctacatgaccaacctggcggtggccgacctctgcctgctgtgcaccttgcccttcgtgctgcactccctgcgagacacctcagacacgccgctgtgccagctctcccagggcatctacctgaccaacaggtacatgagcatcagcctggtcacggccatcgccgtggaccgctatgtggccgtgcggcacccgctgcgtgcccgcgggctgcggtcccccaggcaggctgcggccgtgtgcgcggtcctctgggtgctggtcatcggctccctggtggctcgctggctcctggggattcaggagggcggcttctgcttcaggagcacccggcacaatttcaactccatgcggttcccgctgctgggattctacctgcccctggccgtggtggtcttctgctccctgaaggtggtgactgccctggcccagaggccacccaccgacgtggggcaggcagaggccacccgcaaggctgcccgcatggtctgggccaacctcctggtgttcgtggtctgcttcctgcccctgcacgtggggctgacagtgcgcctcgcagtgggctggaacgcctgtgccctcctggagacgatccgtcgcgccctgtacataaccagcaagctctcagatgccaactgctgcctggacgccatctgctactactacatggccaaggagttccaggaggcgtctgcactggccgtggctccccgtgctaaggcccacaaaagccaggactctctgtgcgtgaccctcgcctaa

SEQ ID NO: 492 - protein, 309 aa, Homo sapiens
MNGTYNTCGSSDLTWPPAIKLGFYAYLGVLLVLGLLLNSLALWVFCCRMQQWTETRIYMTNLAVADLCLLCTLPFVLHSLRDTSDTPLCQLSQGIYLTNRYMSISLVTAIAVDRYVAVRHPLRARGLRSPRQAAAVCAVLWVLVIGSLVARWLLGIQEGGFCFRSTRHNFNSMRFPLLGFYLPLAVVVFCSLKVVTALAQRPPTDVGQAEATRKAARMVWANLLVFVVCFLPLHVGLTVRLAVGWNACALLETIRRALYITSKLSDANCCLDAICYYYMAKEFQEASALAVAPRAKAHKSQDSLCVTLA

SEQ ID NO: 493 - DNA, 1128 bp, Homo sapiens
atggcgaacgcgagcgagccgggtggcagcggcggcggcgaggcggccgccctgggcctcaagctggccacgctcagcctgctgctgtgcgtgagcctagcgggcaacgtgctgttcgcgctgctgatcgtgcgggagcgcagcctgcaccgcgccccgtactacctgctgctcgacctgtgcctggccgacgggctgcgcgcgctcgcctgcctcccggccgtcatgctggcggcgcggcgtgcggcggccgcggcgggggcgccgccgggcgcgctgggctgcaagctgctcgccttcctggccgcgctcttctgcttccacgccgccttcctgctgctgggcgtgggcgtcacccgctacctggccatcgcgcaccaccgcttctatgcagagcgcctggccggctggccgtgcgccgccatgctggtgtgcgccgcctgggcgctggcgctggccgcggccttcccgccagtgctggacggcggtggcgacgacgaggacgcgccgtgcgccctggagcagcggcccgacggcgcccccggcgcgctgggcttcctgctgctgctggccgtggtggtgggcgccacgcacctcgtctacctccgcctgctcttcttcatccacgaccgccgcaagatgcggcccgcgcgcctggtgcccgccgtcagccacgactggaccttccacggcccgggcgccaccggccaggcggccgccaactggacggcgggcttcggccgcgggcccacgccgcccgcgcttgtgggcatccggcccgcagggccgggccgcggcgcgcgccgcctcctcgtgctggaagaattcaagacggagaagaggctgtgcaagatgttctacgccgtcacgctgctcttcctgctcctctgggggccctacgtcgtggccagctacctgcgggtcctggtgcggcccggcgccgtcccccaggcctacctgacggcctccgtgtggctgaccttcgcgcaggccggcatcaaccccgtcgtgtgcttcctcttcaacagggagctgagggactgcttcagggcccagttcccctgctgccagagcccccggaccacccaggcgacccatccctgcgacctgaaaggcattggtttatga

SEQ ID NO: 494 - protein, 375 aa, Homo sapiens
MANASEPGGSGGGEAAALGLKLATLSLLLCVSLAGNVLFALLIVRERSLHRAPYYLLLDLCLADGLRALACLPAVMLAARRAAAAAGAPPGALGCKLLAFLAALFCFHAAFLLLGVGVTRYLAIAHHRFYAERLAGWPCAAMLVCAAWALALAAAFPPVLDGGGDDEDAPCALEQRPDGAPGALGFLLLLAVVVGATHLVYLRLLFFIHDRRKMRPARLVPAVSHDWTFHGPGATGQAAANWTAGFGRGPTPPALVGIRPAGPGRGARRLLVLEEFKTEKRLCKMFYAVTLLFLLLWGPYVVASYLRVLVRPGAVPQAYLTASVWLTFAQAGINPVVCFLFNRELRDCFRAQFPCCQSPRTTQATHPCDLKGIGL

SEQ ID NO: 495 - DNA, 1727 bp, Homo sapiens
atggtccctcacctcttgctgctctgtctcctccccttggtgcgagccaccgagccccacgagggccgggccgacgagcagagcgcggaggcggccctggccgtgcccaatgcctcgcacttcttctcttggaacaactacaccttctccgactggcagaactttgtgggcaggaggcgctacggcgctgagtcccagaaccccacggtgaaagccctgctcattgtggcttactccttcatcattgtcttctcactctttggcaacgtcctggtctgtcatgtcatcttcaagaaccagcgaatgcactcggccaccagcctcttcatcgtcaacctggcagttgccgacataatgatcacgctgctcaacacccccttcactttggttcgctttgtgaacagcacatggatatttgggaagggcatgtgccatgtcagccgctttgcccagtactgctcactgcacgtctcagcactgacactgacagccattgcggtggatcgccaccaggtcatcatgcaccccttgaaaccccggatctcaatcacaaagggtgtcatctacatcgctgtcatctggaccatggctacgttcttttcactcccacatgctatctgccagaaattatttaccttcaaatacagtgaggacattgtgcgctccctctgcctgccagacttccctgagccagctgacctcttctggaagtacctggacttggccaccttcatcctgctctacatcctgcccctcctcatcatctctgtggcctacgctcgtgtggccaagaaactgtggctgtgtaatatgattggcgatgtgaccacagagcagtactttgccctgcggcgcaaaaagaagaagaccatcaagatgttgatgctggtggtagtcctctttgccctctgctggttccccctcaactgctacgtcctcctcctgtccagcaaggtcatccgcaccaacaatgccctctactttgccttccactggtttgccatgagcagcacctgctataaccccttcatatactgctggctgaacgagaacttcaggattgagctaaaggcattactgagcatgtgtcaaagacctcccaagcctcaggaggacgggcaaccctccccagttccttccttcagggtggcctggacagagaagaatgatggccagagggctccccttgccaataacctcctgcccacctcccaactccagtctgggaagacagacctgtcatctgtggaacccattgtgacgatgagttagaagaggttgggaagagggagtgggaggggtctgtctccacctgaggcagggaaagagagcctattctcacacatgatcttcagagtgctggaaacacactcctgcagaaggctgtaggactcttgaattcctaggaaactgtccagcctcctagccccatgtgatgtgaaaactaaaaggcaccaccaactagacatgtgttcataaattcccatctaagaaacactgggaggcacagcagcctgtatctctgaggaagaggagcgaggacaacgttggcccagatgggggctgaatcattcaactgcctccatctgtggggcagctgctgccttacagcccttcctactagactgagcatcccgaaggagacctaaatcatactttgggtgtggtgacccagatgcacagagctctgcttgaaacaggtacacgggccagggaaatgccagcaa

SEQ ID NO: 496 - protein, 423 aa, Homo sapiens
MVPHLLLLCLLPLVRATEPHEGRADEQSAEAALAVPNASHFFSWNNYTFSDWQNFVGRRRYGAESQNPTVKALLIVAYSFIIVFSLFGNVLVCHVIFKNQRMHSATSLFIVNLAVADIMITLLNTPFTLVRFVNSTWIFGKGMCHVSRFAQYCSLHVSALTLTAIAVDRHQVIMHPLKPRISITKGVIYIAVIWTMATFFSLPHAICQKLFTFKYSEDIVRSLCLPDFPEPADLFWKYLDLATFILLYILPLLIISVAYARVAKKLWLCNMIGDVTTEQYFALRRKKKKTIKMLMLVVVLFALCWFPLNCYVLLLSSKVIRTNNALYFAFHWFAMSSTCYNPFIYCWLNENFRIELKALLSMCQRPPKPQEDGQPSPVPSFRVAWTEKNDGQRAPLANNLLPTSQLQSGKTDLSSVEPIVTMS

SEQ ID NO: 497 - DNA, 2588 bp, Homo sapiens
  misc_feature (230)..(230): Unknown Nucleotide
  misc_feature (260)..(260): Unknown Nucleotide
  misc_feature (290)..(290): Unknown Nucleotide
  misc_feature (334)..(334): Unknown Nucleotide
  misc_feature (337)..(337): Unknown Nucleotide
  misc_feature (360)..(360): Unknown Nucleotide
  misc_feature (2204)..(2204): Unknown Nucleotide
  misc_feature (2273)..(2273): Unknown Nucleotide
  misc_feature (2287)..(2287): Unknown Nucleotide
  misc_feature (2311)..(2311): Unknown Nucleotide
  misc_feature (2343)..(2343): Unknown Nucleotide
  misc_feature (2544)..(2544): Unknown Nucleotide
  misc_feature (2559)..(2559): Unknown Nucleotide
  misc_feature (2566)..(2566): Unknown Nucleotide
gggaggggtgcgaggctagccacgcaggcggggccctgggtcattttaaactctcagagtgaacgtcttgataggaccgacaagacgcatgacatgtacttagatagcttatcttagagccacactgagattggaacccgcaaaatatgccagggaggaaggtgagcaagggacacgacactcacccggataaacccaacaagcgcagcgaggctgtggggaaaccgganccctgcacaccgccgggggaaggtgggccnccgccaccaccgtggaagaacagcgcggangcaccccacgagatgagacggaactgccgtgagatccagcaatnccnactgtgggtctgacccaggatancggaaagcagggacgtgaacagccctcctcatgttcttgacaccgtcattctcagcagctcagctaaggcacagaggcagccgagcgtctgtcagcagagtcgtggctgagcagaacacgccacacgccacacgccacacgccacacgtgcaggattgctcaagatggaagggcacagtggaatatatatatatatttatatttttggcgagaccctggaggacacactgaatacaatggaataccatcccgcctttgaaaggaagggaaatcctggcacacgctgcaacaggagggagcttgaggacactgtggtgagtggagcacgtgagacacggaaggacacacgctgaagacacgcagagatgcccacccacgtggggaggtgacaggggagcccagcgcacagagacaaagtggaatggaggcctgggggctgggagcaaatgcggagcgagtgcttcctggggcagagtctccgtttgggaagatgagaaggttctgccgacggatgctggcgatggttgcagaagaatgtgaatgtgcccaatgctactgaaaaacggttacaatggaaacgccaccccagtgaccaccactgccccgtgggcctccctgggcctctccgccaagacctgcaacaacgtgtccttcgaagagagcaggatagtcctggtcgtggtgtacagcgcggtgtgcacgctgggggtgccggccaactgcctgactgcgtggctggcgctgctgcaggtactgcagggcaacgtgctggccgtctacctgctctgcctggcactctgcgagctgctgtacacaggcacgctgccactctgggtcatctatatccgcaaccagcaccgctggaccctaggcctgctggcctgcaaggtgaccgcctacatcttcttctgcaacatctacgtcagcatcctcttcctgtgctgcatctcctgcgaccgcttcgtggccgtggtgtacgcgctggagagtcggggccgccgccgccggaggaccgccatcctcatctccgcctgcatcttcatcctcgtcgggatcgttcactacccggtgttccagacggaagacaaggagacctgctttgacatgctgcagatggacagcaggattgccgggtactactacgccaggttcaccgttggctttgccatccctctctccatcatcgccttcaccaaccaccggattttcaggagcatcaagcagagcatgggcttaagcgctgcccagaaggccaaggtgaagcactcggccatcgcggtggttgtcatcttcctagtctgcttcgccccgtaccacctggttctcctcgtcaaagccgctgccttttcctactacagaggagacaggaacgccatgtgcggcttggaggaaaggctgtacacagcctctgtggtgtttctgtgcctgtccacggtgaacggcgtggctgaccccattatctacgtgctggccacggaccattcccgccaagaagtgtccagaatccataaggggtggaaagagtggtccatgaagacagacgtcaccaggctcacccacagcagggacaccgaggagctgcagtcgcccgtggcccttgcagaccactacaccttctccaggcccgtgcacccaccagggtcaccatgccctgcaaagaggctgattgaggagtcctgctgagcccactgtgtggcagggggatggcaggttgggggtcctggggccagcaatgtggttcctgtgcactgagcccaccagccacagtgcccatgtcccctctggaagacaaactaccaatttctcgttcctgaagccactccctccgtgaccactggccccangctttcccacatggaaggtggctgcatgccaaggggaagagcgacacctccaggcttccgggagcccanagagcatgtggcangcagtggggcctcttcatcatcancctgcctggctggctcccttggctgtgggcangtacacccctgctggcagaagtacctggtggctgccctgttcgcatcagtggcgatgactttatttgcggagcatttctgcaagcgttgcctggatgcggtggtgcattgtgggccctctgggctcctgcctcaaaatgtcagtgagcaccatgctggaagtcaccatcactgtggcagcgcccaggaaggcatagggcancctaccacctccaanggggcangcgccctcatctggggttgggt

SEQ ID NO: 498 - protein, 380 aa, Homo sapiens
MCPMLLKNGYNGNATPVTTTAPWASLGLSAKTCNNVSFEESRIVLVVVYSAVCTLGVPANCLTAWLALLQVLQGNVLAVYLLCLALCELLYTGTLPLWVIYIRNQHRWTLGLLACKVTAYIFFCNIYVSILFLCCISCDRFVAVVYALESRGRRRRRTAILISACIFILVGIVHYPVFQTEDKETCFDMLQMDSRIAGYYYARFTVGFAIPLSIIAFTNHRIFRSIKQSMGLSAAQKAKVKHSAIAVVVIFLVCFAPYHLVLLVKAAAFSYYRGDRNAMCGLEERLYTASVVFLCLSTVNGVADPIIYVLATDHSRQEVSRIHKGWKEWSMKTDVTRLTHSRDTEELQSPVALADHYTFSRPVHPPGSPCPAKRLIEESC

SEQ ID NO: 499 - DNA, 1638 bp, Homo sapiens
cgggtacagggggcccaagagctgggctggctgtctcctgctcatccagccatgcggtggctgtggcccctggctgtctctcttgctgtgattttggctgtggggctaagcagggtctctgggggtgcccccctgcacctgggcaggcacagagccgagacccaggagcagcagagccgatccaagaggggcaccgaggatgaggaggccaagggcgtgcagcagtatgtgcctgaggagtgggcggagtacccccggcccattcaccctgctggcctgcagccaaccaagcccttggtggccaccagccctaaccccgacaaggatgggggcaccccagacagtgggcaggaactgaggggcaatctgacaggggcaccagggcagaggctacagatccagaaccccctgtatccggtgaccgagagctcctacagtgcctatgccatcatgcttctggcgctggtggtgtttgcggtgggcattgtgggcaacctgtcggtcatgtgcatcgtgtggcacagctactacctgaagagcgcctggaactccatccttgccagcctggccctctgggattttctggtcctctttttctgcctccctattgtcatcttcaacgagatcaccaagcagaggctactgggtgacgtttcttgtcgtgccgtgcccttcatggaggtctcctctctgggagtcacgactttcagcctctgtgccctgggcattgaccgcttccacgtggccaccagcaccctgcccaaggtgaggcccatcgagcggtgccaatccatcctggccaagttggctgtcatctgggtgggctccatgacgctggctgtgcctgagctcctgctgtggcagctggcacaggagcctgcccccaccatgggcaccctggactcatgcatcatgaaaccctcagccagcctgcccgagtccctgtattcactggtgatgacctaccagaacgcccgcatgtggtggtactttggctgctacttctgcctgcccatcctcttcacagtcacctgccagctggtgacatggcgggtgcgaggccctccagggaggaagtcagagtgcagggccagcaagcacgagcagtgtgagagccagctcaacagcaccgtggtgggcctgaccgtggtctacgccttctgcaccctcccagagaacgtctgcaacatcgtggtggcctacctctccaccgagctgacccgccagaccctggacctcctgggcctcatcaaccagttctccaccttcttcaagggcgccatcaccccagtgctgctcctttgcatctgcaggccgctgggccaggccttcctggactgctgctgctgctgctgctgtgaggagtgcggcggggcttcggaggcctctgctgccaatgggtcggacaacaagctcaagaccgaggtgtcctcttccatctacttccacaagcccagggagtcacccccactcctgcccctgggcacaccttgctgaggccccagtaggggtggggagggagggagaggccgccacccccgccggtgtctgctgttctttccccataggtcttgctttgttgcctgtcttgctgtctagggatggacttggttcctcttgtcaaggtttgggaatccg

SEQ ID NO: 500 - protein, 481 aa, Homo sapiens
MRWLWPLAVSLAVILAVGLSRVSGGAPLHLGRHRAETQEQQSRSKRGTEDEEAKGVQQYVPEEWAEYPRPIHPAGLQPTKPLVATSPNPDKDGGTPDSGQELRGNLTGAPGQRLQIQNPLYPVTESSYSAYAIMLLALVVFAVGIVGNLSVMCIVWHSYYLKSAWNSILASLALWDFLVLFFCLPIVIFNEITKQRLLGDVSCRAVPFMEVSSLGVTTFSLCALGIDRFHVATSTLPKVRPIERCQSILAKLAVIWVGSMTLAVPELLLWQLAQEPAPTMGTLDSCIMKPSASLPESLYSLVMTYQNARMWWYFGCYFCLPILFTVTCQLVTWRVRGPPGRKSECRASKHEQCESQLNSTVVGLTVVYAFCTLPENVCNIVVAYLSTELTRQTLDLLGLINQFSTFFKGAITPVLLLCICRPLGQAFLDCCCCCCCEECGGASEASAANGSDNKLKTEVSSSIYFHKPRESPPLLPLGTPC

SEQ ID NO: 501 - DNA, 1566 bp, Homo sapiens
gagtcagcccccgggggaggccatgaacgccacggggaccccggtggcccccgagtcctgccaacagctggcggccggcgggcacagccggctcattgttctgcactacaaccactcgggccggctggccgggcgcggggggccggaggatggcggcctgggggccctgcgggggctgtcggtggccgccagctgcctggtggtgctggagaacttgctggtgctggcggccatcaccagccacatgcggtcgcgacgctgggtctactattgcctggtgaacatcacgctgagtgacctgctcacgggcgcggcctacctggccaacgtgctgctgtcgggggcccgcaccttccgtctggcgcccgcccagtggttcctacgggagggcctgctcttcaccgccctggccgcctccaccttcagcctgctcttcactgcaggggagcgctttgccaccatggtgcggccggtggccgagagcggggccaccaagaccagccgcgtctacggcttcatcggcctctgctggctgctggccgcgctgctggggatgctgcctttgctgggctggaactgcctgtgcgcctttgaccgctgctccagccttctgcccctctactccaagcgctacatcctcttctgcctggtgatcttcgccggcgtcctggccaccatcatgggcctctatggggccatcttccgcctggtgcaggccagcgggcagaaggccccacgcccagcggcccgccgcaaggcccgccgcctgctgaagacggtgctgatgatcctgctggccttcctggtgtgctggggcccactcttcgggctgctgctggccgacgtctttggctccaacctctgggcccaggagtacctgcggggcatggactggatcctggccctggccgtcctcaactcggcggtcaaccccatcatctactccttccgcagcagggaggtgtgcagagccgtgctcagcttcctctgctgcgggtgtctccggctgggcatgcgagggcccggggactgcctggcccgggccgtcgaggctcactccggagcttccaccaccgacagctctctgaggccaagggacagctttcgcggctcccgctcgctcagctttcggatgcgggagcccctgtccagcatctccagcgtgcggagcatctgaagttgcagtcttgcgtgtggatggtgcagccaccgggtgcgtgccaggcaggccctcctggggtacaggaagctgtgtgcacgcagcctcgcctgtatggggagcagggaacgggacaggcccccatggtcttcccggtggcctctcggggcttctgacgccaaatgggcttcccatggtcaccctggacaaggaggtaaccaccccacctccccgtaggagcagagagcaccctggtgtgggggcgagtggttccccacaaccccgcttctgtgtgattctggggaagtcccggcccctctctgggcctcagtagggctcccaggctgcaaggggtggactgtgggatgcatgccctggcaacattgaagttcgatcatggtaaaaaa

SEQ ID NO: 502 - protein, 384 aa, Homo sapiens
MNATGTPVAPESCQQLAAGGHSRLIVLHYNHSGRLAGRGGPEDGGLGALRGLSVAASCLVVLENLLVLAAITSHMRSRRWVYYCLVNITLSDLLTGAAYLANVLLSGARTFRLAPAQWFLREGLLFTALAASTFSLLFTAGERFATMVRPVAESGATKTSRVYGFIGLCWLLAALLGMLPLLGWNCLCAFDRCSSLLPLYSKRYILFCLVIFAGVLATIMGLYGAIFRLVQASGQKAPRPAARRKARRLLKTVLMILLAFLVCWGPLFGLLLADVFGSNLWAQEYLRGMDWILALAVLNSAVNPIIYSFRSREVCRAVLSFLCCGCLRLGMRGPGDCLARAVEAHSGASTTDSSLRPRDSFRGSRSLSFRMREPLSSISSVRSI

SEQ ID NO: 503 - DNA, 1014 bp, Homo sapiens
atgaacagcacatgtattgaagaacagcatgacctggatcactatttgtttcccattgtttacatctttgtgattatagtcagcattccagccaatattggatctctgtgtgtgtctttcctgcaacccaagaaggaaagtgaactaggaatttacctcttcagtttgtcactatcagatttactctatgcattaactctccctttatggattgattatacttggaataaagacaactggactttctctcctgccttgtgcaaagggagtgcttttctcatgtacatgaagttttacagcagcacagcattcctcacctgcattgccgttgatcggtatttggctgttgtctaccctttgaagttttttttcctaaggacaagaagaattgcactcatggtcagcctgtccatctggatattggaaaccatcttcaatgctgtcatgttgtgggaagatgaaacagttgttgaatattgcgatgccgaaaagtctaattttactttatgctatgacaaataccctttagagaaatggcaaatcaacctcaacttgttcaggacgtgtacaggctatgcaatacctttggtcaccatcctgatctgtaaccggaaagtctaccaagctgtgcggcacaataaagccacggaaaacaaggaaaagaagagaatcataaaactacttgtcagcatcacagttacttttgtcttatgctttactccctttcatgtgatgttgctgattcgctgcattttagagcatgctgtgaacttcgaagaccacagcaattctgggaagcgaacttacacaatgtatagaatcacggttgcattaacaagtttaaattgtgttgctgatccaattctgtactgttttgttaccgaaacaggaagatatgatatgtggaatatattaaaattctgcactgggaggtgtaatacatcacaaagacaaagaaaacgcatactttctgtgtctacaaaagatactatggaattagaggtccttgagtag

SEQ ID NO: 504 - protein, 337 aa, Homo sapiens
MNSTCIEEQHDLDHYLFPIVYIFVIIVSIPANIGSLCVSFLQPKKESELGIYLFSLSLSDLLYALTLPLWIDYTWNKDNWTFSPALCKGSAFLMYMKFYSSTAFLTCIAVDRYLAVVYPLKFFFLRTRRIALMVSLSIWILETIFNAVMLWEDETVVEYCDAEKSNFTLCYDKYPLEKWQINLNLFRTCTGYAIPLVTILICNRKVYQAVRHNKATENKEKKRIIKLLVSITVTFVLCFTPFHVMLLIRCILEHAVNFEDHSNSGKRTYTMYRITVALTSLNCVADPILYCFVTETGRYDMWNILKFCTGRCNTSQRQRKRILSVSTKDTMELEVLE

SEQ ID NO: 505 - DNA, 2110 bp, Homo sapiens
cgagccccgccgcaagctgagcgcctccgcccgccaggcgcgccggcgccgggccatgtactcggggaaccgcagcggcggccacggctactgggacggcggcggggccgcgggcgctgaggggccggcgccggcggggacactgagccccgcgcccctcttcagccccggcacctacgagcgcctggcgctgctgctgggctccattgggctgctgggcgtcggcaacaacctgctggtgctcgtcctctactacaagttccagcggctccgcactcccactcacctcctcctggtcaacatcagcctcagcgacctgctggtgtccctcttcggggtcacctttaccttcgtgtcctgcctgaggaacggctgggtgtgggacaccgtgggctgcgtgtgggacgggtttagcggcagcctcttcgggattgtttccattgccaccctaaccgtgctggcctatgaacgttacattcgcgtggtccatgccagagtgatcaatttttcctgggcctggagggccattacctacatctggctctactcactggcgtgggcaggagcacctctcctgggatggaacaggtacatcctggacgtacacggactaggctgcactgtggactggaaatccaaggatgccaacgattcctcctttgtgcttttcttatttcttggctgcctggtggtgcccctgggtgtcatagcccattgctatggccatattctatattccattcgaatgcttcgttgtgtggaagatcttcagacaattcaagtgatcaagattttaaaatatgaaaagaaactggccaaaatgtgctttttaatgatattcaccttcctggtctgttggatgccttatatcgtgatctgcttcttggtggttaatggtcatggtcacctggtcactccaacaatatctattgtttcgtacctctttgctaaatcgaacactgtatacaatccagtgatttatgtcttcatgatcagaaagtttcgaagatcccttttgcagcttctgtgcctccgactgctgaggtgccagaggcctgctaaagacctaccagcagctggaagtgaaatgcagatcagacccattgtgatgtcacagaaagatggggacaggccaaagaaaaaagtgactttcaactcttcttccatcatttttatcatcaccagtgatgaatcactgtcagttgacgacagcgacaaaaccattggggtccaaagtttgatgttaatccaagttcgtcctttgtaggaatgaaggatggcaacgaaaggtggggccttaaattggatgccacttttggactttcatcatcctcctgaagaagaagtgtctggaatacccgttctatgtaatatcaacagaaccttgtggtccagcaggaaatccgaattgcccatatgctcttgggcctcaggaagaggttgaacaaaaacaaattcttttaattcaacgggtgctttacataatgaaaaaaccacttgtgcacacgatgggcatctaacatcatcatcttctaatgtgttggagattttcatttcaaatatattttttaaattactctattttccaaaacacgtaatgcatttttctcgaaaataccttactgtaaaaataactgtcgcgtacacatgtgtgaagtagctagaacatactgaattttttttgtactgttggactctattcagtgtcatgtcctatatctgatcaagttatcaaggagataattctagaatgaaaaagaaaatcctcttgttggaaacaaaagacgttttatatgtgcagtatgacaaagaggagtttcagagacaactttgaatccttgtcagcctggagaccagcaccagaggaatctacaaggcaaactcccatatatttgcttcccccaaattgctgcccctacagactcaaagctctttttctttgttttgttgtttctctaaaaatttactgttctttgtcgatgctatataagccagggagttctaagacgccagctctttgagatttgctcattcccctgtatttcccacatatatattacatatacccgctaataaatttatgtttgttttaaaaaaaaaaaaaaaaaaa

SEQ ID NO: 506 - protein, 403 aa, Homo sapiens
MYSGNRSGGHGYWDGGGAAGAEGPAPAGTLSPAPLFSPGTYERLALLLGSIGLLGVGNNLLVLVLYYKFQRLRTPTHLLLVNISLSDLLVSLFGVTFTFVSCLRNGWVWDTVGCVWDGFSGSLFGIVSIATLTVLAYERYIRVVHARVINFSWAWRAITYIWLYSLAWAGAPLLGWNRYILDVHGLGCTVDWKSKDANDSSFVLFLFLGCLVVPLGVIAHCYGHILYSIRMLRCVEDLQTIQVIKILKYEKKLAKMCFLMIFTFLVCWMPYIVICFLVVNGHGHLVTPTISIVSYLFAKSNTVYNPVIYVFMIRKFRRSLLQLLCLRLLRCQRPAKDLPAAGSEMQIRPIVMSQKDGDRPKKKVTFNSSSIIFIITSDESLSVDDSDKTIGVQSLMLIQVRPL

SEQ ID NO: 507 - DNA, 1062 bp, Homo sapiens
atgggcagcttgtactcggagtacctgaaccccaacaaggtccaggaacactataattataccaaggagacgctggaaacgcaggagacgacctcccgccaggtggcctcggccttcatcgtcatcctctgttgcgccattgtggtggaaaaccttctggtgctcattgcggtggcccgaaacagcaagttccactcggcaatgtacctgtttctgggcaacctggccgcctccgatctactggcaggcgtggccttcgtagccaataccttgctctctggctctgtcacgctgaggctgacgcctgtgcagtggtttgcccgggagggctctgcctccatcacgctctcggcctctgtcttcagcctcctggccatcgccattgagcgccacgtggccattgccaaggtcaagctgtatggcagcgacaagagctgccgcatgcttctgctcatcggggcctcgtggctcatctcgctggtcctcggtggcctgcccatccttggctggaactgcctgggccacctcgaggcctgctccactgtcctgcctctctacgccaagcattatgtgctgtgcgtggtgaccatcttctccatcatcctgttggccatcgtggccctgtacgtgcgcatctactgcgtggtccgctcaagccacgctgacatggccgccccgcagacgctagccctgctcaagacggtcaccatcgtgctaggcgtctttatcgtctgctggctgcccgccttcagcatcctccttctggactatgcctgtcccgtccactcctgcccgatcctctacaaagcccactactttttcgccgtctccaccctgaattccctgctcaaccccgtcatctacacgtggcgcagccgggacctgcggcgggaggtgcttcggccgctgcagtgctggcggccgggggtgggggtgcaaggacggaggcgggtcgggaccccgggccaccacctcctgccactccgcagctccagctccctggagaggggcatgcacatgcccacgtcacccacgtttctggagggcaacacggtggtctga

SEQ ID NO: 508 - protein, 353 aa, Homo sapiens
MGSLYSEYLNPNKVQEHYNYTKETLETQETTSRQVASAFIVILCCAIVVENLLVLIAVARNSKFHSAMYLFLGNLAASDLLAGVAFVANTLLSGSVTLRLTPVQWFAREGSASITLSASVFSLLAIAIERHVAIAKVKLYGSDKSCRMLLLIGASWLISLVLGGLPILGWNCLGHLEACSTVLPLYAKHYVLCVVTIFSIILLAIVALYVRIYCVVRSSHADMAAPQTLALLKTVTIVLGVFIVCWLPAFSILLLDYACPVHSCPILYKAHYFFAVSTLNSLLNPVIYTWRSRDLRREVLRPLQCWRPGVGVQGRRRVGTPGHHLLPLRSSSSLERGMHMPTSPTFLEGNTVV

SEQ ID NO: 509 - DNA, 1368 bp, Homo sapiens
atgatctgctgcagtgctctgagccctaggattcatctttcttttcaccgtagcctgactggcattgtattagcaaactcatcactagacatcgtactacacgacacgtactacgttgtagcccactgcgggggaaatgttaggcgcctgcattgcggtggccccgcgtcccgggagcgcacagcaatgcaggcgcttaacattaccccggagcagttctctcggctgctgcgggaccacaacctgacgcgggagcagttcatcgctctgtaccggctgcgaccgctcgtctacaccccagagctgccgggacgcgccaagctggccctcgtgctcaccggcgtgctcatcttcgccctggcactctttggcaatgctctggtgttctacgtggtgacccgcagcaaggccatgcgcaccgtcaccaacatctttatctgctccttggcgctcagtgacctgctcatcaccttcttctgcattcccgtcaccatgctccagaacatttccgacaactggctggggggtgctttcatttgcaagatggtgccatttgtccagtctaccgctgttgtgacagaaatcctcactatgacctgcattgctgtggaaaggcaccagggacttgtgcatccttttaaaatgaagtggcaatacaccaaccgaagggctttcacaatgctaggtgtggtctggctggtggcagtcatcgtaggatcacccatgtggcacgtgcaacaacttgagatcaaatatgacttcctatatgaaaaggaacacatctgctgcttagaagagtggaccagccctgtgcaccagaagatctacaccaccttcatcctgtcatcctcttcctcctgcctcttatggaagaagaaacgagctgtcattatgatggtgacagtggtggctctctttgctgtgtgctgggcaccattccatgttgtccatatgatgattgaatacagtaattttgaaaaggaatatgatgatgtcacaatcaagatgatttttgctatcgtgcaaattattggattttccaactccatctgtaatcccattgtctatgcatttatgaatgaaaacttcaaaaaaaatgttttgtctgcagtttgttattgcatagtaaataaaaccttctctccagcacaaaggcatggaaattcaggaattacaatgatgcggaagaaagcaaagttttccctcagagagaatccagtggaggaaaccaaaggagaagcattcagtgatggcaacattgaagtcaaattgtgtgaacagacagaggagaagaaaaagctcaaacgacatcttgctctctttaggtctgaactggctgagaattctcctttagacagtgggcattaa

SEQ ID NO: 510 - protein, 245 aa, Homo sapiens
MKIKYDFLYEKEHICCLEEWTSPVHQKIYTTFILVILFLLPLMVMLILYSKIGYELWIKKRVGDGSVLRTIHGKEMSKIARKKKRAVIMMVTVVALFAVCWAPFHVVHMMIEYSNFEKEYDDVTIKMIFAIVQIIGFSNSICNPIVYAFMNENFKKNVLSAVCYCIVNKTFSPAQRHGNSGITMMRKKAKFSLRENPVEETKGEAFSDGNIEVKLCEQTEEKKKLKRHLALFRSELAENSPLDSG

SEQ ID NO: 511 - DNA, 1936 bp, Homo sapiens
tctggagccaagtaatggtgatactgatgcttccttttctttgccgcgctcggattctgagtttcacaagaatgtacctgggtgccccttagcgggatatgaatagcttcttcggaaccccagcggccagctggtgcctcctggaaagtgacgtctcatctgcaccggacaaggaggcggggagggagcgcagagcactcagcgtccagcagcgcggcgggccagcctggagcggaagcctggagtggagcaggcagtccgcgggggacagacgtcggctgggattgagccggcagactgcgaaaagtagctggagccggagcagggacagaacctgttgctgcagacgggcttggtggattctggttcctgccgccgacagggctcgccgggagaggttcatcatgaatgagaaatgggacacaaactcttcagaaaactggcatcccatctggaatgtcaatgacacaaagcatcatctgtactcagatattaatattacctatgtgaactactatcttcaccagcctcaagtggcagcaatcttcattatttcctactttctgatcttctttttgtgcatgatgggaaatactgtggtttgctttattgtaatgaggaacaaacatatgcacacagtcactaatctcttcatcttaaacctggccataagtgatttactagttggcatattctgcatgcctataacactgctggacaatattatagcaggatggccatttggaaacacgatgtgcaagatcagtggattggtccagggaatatctgtcgcagcttcagtctttacgttagttgcaattgctgtagataggttccagtgtgtggtctacccttttaaaccaaagctcactatcaagacagcgtttgtcattattatgatcatctgggtcctagccatcaccattatgtctccatctgcagtaatgttacatgtgcaagaagaaaaatattaccgagtgagactcaactcccagaataaaaccagtccagtctactggtgccgggaagactggccaaatcaggaaatgaggaagatctacaccactgtgctgtttgccaacatctacctggctcccctctccctcattgtcatcatgtatggaaggattggaatttcactcttcagggctgcagttcctcacacaggcaggaagaaccaggagcagtggcacgtggtgtccaggaaaaagcagaagatcattaagatgctcctgattgtggccctgctttttattctctcatggctgcccctgtggactctaatgatgctctcagactacgctgacctttctccaaatgaactgcagatcatcaacatctacatctacccttttgcacactggctggcattcggcaacagcagtgtcaatcccatcatttatggtttcttcaacgagaatttccgccgtggtttccaagaagctttccagctccagctctgccaaaaaagagcaaagcctatggaagcttataccctaaaagctaaaagccatgtgctcataaacacatctaatcagcttgtccaggaatctacatttcaaaaccctcatggggaaaccttgctttataggaaaagtgctgaaaaaccccaacaggaattagtgatggaagaattaaaagaaactactaacagcagtgagatttaaaaagagctagtgtgataatcctaactctactacgcattatatatttaaatccattgctttttgtggctttgcacttcaaatttttcaaagaatgttctaaataaaacatttactgaaagccctctctggcaaaaaaattaaaaataaacaaaaatggtcataagatcataaacaatcttatgttgtataaaaatacgtagagtgacttagacatgtttgcatgaataaatatatttctagagaacagttaaaaaaaaaaaaaaaaaaaa

SEQ ID NO: 512 - protein, 522 aa, Homo sapiens
MNSFFGTPAASWCLLESDVSSAPDKEAGRERRALSVQQRGGPAWSGSLEWSRQSAGDRRRLGLSRQTAKSSWSRSRDRTCCCRRAWWILVPAADRARRERFIMNEKWDTNSSENWHPIWNVNDTKHHLYSDINITYVNYYLHQPQVAAIFIISYFLIFFLCMMGNTVVCFIVMRNKHMHTVTNLFILNLAISDLLVGIFCMPITLLDNIIAGWPFGNTMCKISGLVQGISVAASVFTLVAIAVDRFQCVVYPFKPKLTIKTAFVIIMIIWVLAITIMSPSAVMLHVQEEKYYRVRLNSQNKTSPVYWCREDWPNQEMRKIYTTVLFANIYLAPLSLIVIMYGRIGISLFRAAVPHTGRKNQEQWHVVSRKKQKIIKMLLIVALLFILSWLPLWTLMMLSDYADLSPNELQIINIYIYPFAHWLAFGNSSVNPIIYGFFNENFRRGFQEAFQLQLCQKRAKPMEAYTLKAKSHVLINTSNQLVQESTFQNPHGETLLYRKSAEKPQQELVMEELKETTNSSEI

SEQ ID NO: 513 - DNA, 2857 bp, Homo sapiens
aacagtattttccttttcaacacatctattgaaagtgttggataaatgcaggatgttaatatgctataaacataaagtctgtttttaaaaaatagcatttgaaaatcatgaagggctttttgttttcttttgtttgtatatatgtttattggtaacaggtgacactggaagcaatgaacaccacagtgatgcaaggcttcaacagatctgagcggtgccccagagacactcggatagtacagctggtattcccagccctctacacagtggttttcttgaccggcatcctgctgaatactttggctctgtgggtgtttgttcacatccccagctcctccaccttcatcatctacctcaaaaacactttggtggccgacttgataatgacactcatgcttcctttcaaaatcctctctgactcacacctggcaccctggcagctcagagcttttgtgtgtcgtttttcttcggtgatattttatgagaccatgtatgtgggcatcgtgctgttagggctcatagcctttgacagattcctcaagatcatcagacctttgagaaatatttttctaaaaaaacctgtttttgcaaaaacggtctcaatcttcatctggttctttttgttcttcatctccctgccaaatatgatcttgagcaacaaggaagcaacaccatcgtctgtgaaaaagtgtgcttccttaaaggggcctctggggctgaaatggcatcaaatggtaaataacatatgccagtttattttctggactgtttttatcctaatgcttgtgttttatgtggttattgcaaaaaaagtatatgattcttatagaaagtccaaaagtaaggacagaaaaaacaacaaaaagctggaaggcaaagtatttgttgtcgtggctgtcttctttgtgtgttttgctccatttcattttgccagagttccatatactcacagtcaaaccaacaataagactgactgtagactgcaaaatcaactgtttattgctaaagaaacaactctctttttggcagcaactaacatttgtatggatcccttaatatacatattcttatgtaaaaaattcacagaaaagctaccatgtatgcaagggagaaagaccacagcatcaagccaagaaaatcatagcagtcagacagacaacataaccttaggctgacaactgtacatagggttaacttctatttattgatgagacttccgtagataatgtggaaatcaaatttaaccaagaaaaaaagattggaacaaatgctctcttacattttattatcctggtgtacagaaaagattatataaaatttaaatccacatagatctattcataagctgaatgaaccattactaagagaatgcaacaggatacaaatggccactagaggtcattatttctttctttcttttttttttttttaatttcaagagcatttcactttaacattttggaaaagactaaggagaaacgtatatccctacaaacctcccctccaaacaccttctcacattcttttccacaattcacataacactactgcttttgtgccccttaaatgtagatatgtgctgaaagaaaaaaaaaacgcccaactcttgaagtccattgctgaaaactgcagccaggggttgaaagggatgcagacttgaagagtctgaggaactgaagtgggtcagcaagacctctgaaatcctgggtaaaggattttctccttacaattacaaacagcctctttcacattacaataatataccataggaggcacaagcaccattattaagccactttgcttacaccttaagtgtgtacaattcaagtgtgagaatgctgtgttaactattctttggaattctccttctgtccagcaaatactctaatgatggttaaacatggcacctactcagcaatgccttcctggaccacaacccctatccccctgccccaccctcctcattaaaaacaaatacttctactgtttgggtgtgtgatagggttctcaatgcagatctcccttttctagttagctatattcttgactgcatccgctaaaaatgttaaagcttcttgagagacagacatgccagattttcttggtatctcccataatacgacctacagtccatggtctacagatgttttaaatagaattgctattctcgatacatacaaagacgtaattgctgacccacaatcagtaacatccatattgggagatttttcaaaggatggtgaccctgcttgtatttatttaccttggtattttttcttgcatccttctgtgattcaaaaaagtaaaatgtggctttctgaaatgatggataagagtctacatcttctagaaaaaatacataaaggagtagttaagctctgtaaatgtgccacgagctccaacacgaccatcgtagggtgaagcccacgttttcttccatggcctcaaaggccctagaacttgcctacctttctggccttacctcctagctacttatccatctcttgaactttatactcttgtataaatttctaactttcagaaaatgccatactctgttttggcaccacacatgtatatttccccctggtacacttggaagactcttatccatctgtgaaaccctatgttgtcatcacttggtccatgaaatattacctggccaatatcccaccatcacctcaaacccaatcaccccctcctctgtatgctgtcacacctatattattaaacttatcacattgcattgtaattacttcctgacctttgtatctactcttttagtaactgatgtatatatctgaaaggagagattgtttcattgtgcaatcaataaatgtttgataaaataaagccc

SEQ ID NO: 514 - protein, 333 aa, Homo sapiens
MNTTVMQGFNRSERCPRDTRIVQLVFPALYTVVFLTGILLNTLALWVFVHIPSSSTFIIYLKNTLVADLIMTLMLPFKILSDSHLAPWQLRAFVCRFSSVIFYETMYVGIVLLGLIAFDRFLKIIRPLRNIFLKKPVFAKTVSIFIWFFLFFISLPNMILSNKEATPSSVKKCASLKGPLGLKWHQMVNNICQFIFWTVFILMLVFYVVIAKKVYDSYRKSKSKDRKNNKKLEGKVFVVVAVFFVCFAPFHFARVPYTHSQTNNKTDCRLQNQLFIAKETTLFLAATNICMDPLIYIFLCKKFTEKLPCMQGRKTTASSQENHSSQTDNITLG

SEQ ID NO: 515 - DNA, 4895 bp, Homo sapiens
ctcccacgggctggctggcaagcggccctggtgggtctgcgggggcaggggcagccttcctggtttatctccaccggcgcgatctgctcgtccgcctcggctccagaagctggggctcagggtccggcgaggcaggaagcctgaggccacagcccagagcagcctgagtgcagtcatgtgggggcgactgctcctgtggcccctggtgctggggttcagcctgtctggcggcacccagacccccagcgtctacgacgagagcgggagcaccggaggtggtgatgacagcacgccctcaatcctgcctgccccccgcggctacccaggccaagtctgtgccaatgacagtgacaccctggagctcccggacagctcacgggcactgcttctgggctgggtgcccaccaggctggtgcccgccctctatgggctggtcctggtggtggggctgccggccaatgggctggcgctgtgggtgctggccacgcaggcacctcggctgccctccaccatgctgctgatgaacctcgcgactgctgacctcctgctggccctggcgctgcccccgcggatcgcctaccacctgcgtggccagcgctggcccttcggggaggccgcctgccgcctggccacggccgcactctatggtcacatgtatggctcagtgctgctgctggccgccgtcagcctggatcgctacctggccctggtgcacccgctgcgggcccgcgccctgcgtggccggcgcctggcccttggactctgcatggctgcttggctcatggcggccgccctggcactgcccctgacactgcagcggcagaccttccggctggcgcgctccgatcgcgtgctctgccatgacgcgctgcccctggacgcacaggcctcccactggcaaccggccttcacctgcctggcgctgttgggctgtttcctgcccctgctggccatgctgctgtgctacggggccaccctgcacacgctggcggccagcggccggcgctacggccacgcgctgaggctgaccgcagtggtgctggcctccgccgtggccttcttcgtgcccagcaacctgctgctgctgctgcattactcggacccgagccccagcgcctggggcaacctctatggtgcctacgtgcccagcctggcgctgagcaccctcaacagctgcgtggatcccttcatctactactacgtgtcggccgagttcagggacaaggtgcgggcagggctcttccaacggtcgccgggggacaccgtggcctccaaggcctctgcggaagggggcagccggggcatgggcacccactcctctttgctccagtgacacaaagtggggaaggctgtactgggtcgaacagggtcccttcccccacttcacgtccttcctgggacctcagaatgtgaccttatttggaaatagggttgttacaactgtcactagcggaggtcactttggagaagggtgggccttacatccagtgtgggtggtgtcctcataagataaggagaggccaggcctggtggctcacgcctgtaatcccagcactttaagaggccaaggcggatggatcacttgagcccaggagttcaacaccagcctgagcaacatggtaaaaccccatctctaccaaaaatacaaaaattagctgggcttggtggctggcgcctgtaatcccagctactcaggagactgaggcagaaggatcgcttgaacctgggaggcagaggttgcagtgagccgagattgcgccactggactccagcctgcgtgacagagagcctgtctctaaattaattaattaattaatttaattcaattttaaaaagacgaaaagtgacggccaggtgcagtggctcacgcctataatctcagcactctgggaggccaagatggaggattgcttgaagccaggagtttgggaccagcctgggcaacatagggggatcccatctctacacacaaaaaaattttttaatgaaccaggcattgtggcatgcgcctatagtcccagccactcaagaggcacaggcgggaggatcacttgagcctgggaggttgtggttgcagtgagctatgattgtaccactgcactccagcctgggcaacagagcaagaccttgtctcaaaaataaacaaactaaaattaaaaaaagaagacgagagatagtgggtgtggtggctcacacctgcaatcccagcactttggaaggccgaggtgggcagatcatctgaggccaggagttcaagaccagcctggctaacatggtgaaatcctatctctaccaaaaatacaaaaattagccaggcgtggtggtgggcacctgtactggggaggtgcccacccagctactggggaggctgagtcaggagaatcgcttgaacctgggaggcggaggttgcggtcagctgagatggtgccactgcactccagcctgggcgaaagagcgactctgtctccaaaaaaaagagaagaggagaggacacagagacacacagagaagaaagccatgtggcggcagaggcagagatgggagtgatgcggacggacacaaactaagggatgccacgatgccaagcacagccaacagccaccagcagccaggagacaggcctgggacgggctctccctcacagcctccagagggaaccagccctgccaccaccttgaccctggacttctggcctgcagaactgtgagacaataaactctcattgttttaagctgcctggcatgtggcactttgtcagggcagcccaggaatctgaaacaggatcaaactctgcttcctgggccctgccagcatctctggctcggctttctgggctggatgcagcccacgacgcactggtgtctgagatggggctggagctggggctggggctgcattccctggagactcactgcaagttcctgcccaggaggctgagggcaccccatcctcagtgcccaatgctgtggccccaccaggcccagagcctggttggccattctcatgcccaccagcttctggctttgggatgtctcttgagcaaccagaatagcacccccaactctgctccccaaaacccatcactagcacggctcagcctcctgctatcccctgactgctggggaccctcgccttccctcctctcacctgcaggctgatccttcttttcactttctgtcaatgtcaccagggataaggtgggacaatggggggtgggggtggacagtgtgtgctggggggttcgggtgctgcagacctggaactcccttctgccaggatgttggcagccggttgtaagccttgcacgggacagaccacacccaccgcaacctcatcccctcagcactaaccacatccactctcaaccccgtccccttcgcactgaccacacccaccccgttcggccccgccccccgcactgaacactcccgccctcaaccccgcaccctccgcactcacctccccctcgccgctcgaccccgccctcaccacactgaccaccctcaacccattgcgcccagtccccaccacagtgaccacaccctcactggctcggccctgcccccagtatactgaccattccccagccacttcccttccgcacttaccactcccccagccacgcccctccccgctgaccgctcctccagccccgcctcccccgtacaggcagagcgcccgcccacctctatgctgcgttctcctgactttacgttggcccctcctctgccaagcccccaggggagccctccctggcgtccgagggtgggagtcggggtgtggcaggccgcggtggggggcggcagtggctccgcgcactcacccgggccccgggcaggggcgcgctccacttcgttgcacgcgggtccggcgcacagttcccgggcgagtgggctgtgcgtgctgacgttgtagaagcgagtggcctcgaaggctacgggacgagggtggcgggtgaccaagtgcaggcgcgacgggtcagggaccgggccgggccgggggtgcgggcgcgcgggcctaccgggttcgtagtagtcgtacacggagactggcagcgccgacgtcctgcccaccacgcactcccggagagcacggaaccgcacgcacgtcaggcaccggctggggatctgtggggcagcggcgggcgcaggctcgacccgggccaggaggcccggggcgctgagctcaggcccagaactggctgatttcagggatacccaggacgcgtgaaacacagaagaaacgtgatcccattttctttttttcttttacttttctttttttttttttttcctgagacagagtctcgcgctgttgcccaggctggagtgcagtggcgtgatctcggctcactgcaagctcggcctcctgggttcaaatgattctcctgcctcagcctcccaagtagctgggataacaggcgcccaccaccgcaccctgctaattttttgtatttttgatcaagacggagtttcaccatgttggccaggctggtctccaactcctgccctcaagtgatccgcctcggtcccattttttattctttgggtccttccatcccactgggaaaacgtctcaggtggcctctgaaacaccactcctttttgtgtgtgtgcacgcatggctgagcatgtgtgggtgggagtcagcacattcacgatactgtgcaatcatcacctctgtctagttacaggacggtttctttctcccccaaagaaaccccatcgccatcagcactcactccccactcccccagcccctggcaaccacaaatctttccaactctacggatttgcctgttctgggcatttcatgtcaatggaatcatgtactctgtgaaaaaaaaaaaaaaaaaaaaaaaaaaaaaaaaaaaaaaaaaaaaaaaaaaaaaaaaa

SEQ ID NO: 516 - protein, 385 aa, Homo sapiens
MWGRLLLWPLVLGFSLSGGTQTPSVYDESGSTGGGDDSTPSILPAPRGYPGQVCANDSDTLELPDSSRALLLGWVPTRLVPALYGLVLVVGLPANGLALWVLATQAPRLPSTMLLMNLATADLLLALALPPRIAYHLRGQRWPFGEAACRLATAALYGHMYGSVLLLAAVSLDRYLALVHPLRARALRGRRLALGLCMAAWLMAAALALPLTLQRQTFRLARSDRVLCHDALPLDAQASHWQPAFTCLALLGCFLPLLAMLLCYGATLHTLAASGRRYGHALRLTAVVLASAVAFFVPSNLLLLLHYSDPSPSAWGNLYGAYVPSLALSTLNSCVDPFIYYYVSAEFRDKVRAGLFQRSPGDTVASKASAEGGSRGMGTHSSLLQ

SEQ ID NO: 517 - DNA, 2822 bp, Homo sapiens
cggcagcagggtctcgctctgtcacacaggctggagtgcagtggtgtgatcttggctcatcgtaacctccacctcccgggttcaagtgattctcatgcctcagcctcccgagtagctgggattacaggtggtgacttccaagagtgactccgtcggaggaaaatgactccccagtcgctgctgcagacgacactgttcctgctgagtctgctcttcctggtccaaggtgcccacggcaggggccacagggaagactttcgcttctgcagccagcggaaccagacacacaggagcagcctccactacaaacccacaccagacctgcgcatctccatcgagaactccgaagaggccctcacagtccatgcccctttccctgcagcccaccctgcttcccgatccttccctgaccccaggggcctctaccacttctgcctctactggaaccgacatgctgggagattacatcttctctatggcaagcgtgacttcttgctgagtgacaaagcctctagcctcctctgcttccagcaccaggaggagagcctggctcagggccccccgctgttagccacttctgtcacctcctggtggagccctcagaacatcagcctgcccagtgccgccagcttcaccttctccttccacagtcctccccacacggccgctcacaatgcctcggtggacatgtgcgagctcaaaagggacctccagctgctcagccagttcctgaagcatccccagaaggcctcaaggaggccctcggctgcccccgccagccagcagttgcagagcctggagtcgaaactgacctctgtgagattcatgggggacatggtgtccttcgaggaggaccggatcaacgccacggtatggaagctccagcccacagccggcctccaggacctgcacatccactcccggcaggaggaggagcagagcgagatcatggagtactcggtgctgctgcctcgaacactcttccagaggacgaaaggccggagcggggaggctgagaagagactcctcctggtggacttcagcagccaagccctgttccaggacaagaattccagccaagtcctgggtgagaaggtcttggggattgtggtacagaacaccaaagtagccaacctcacggagcccgtggtgctcactttccagcaccagctacagccgaagaatgtgactctgcaatgtgtgttctgggttgaagaccccacattgagcagcccggggcattggagcagtgctgggtgtgagaccgtcaggagagaaacccaaacatcctgcttctgcaaccacttgacctactttgcagtgctgatggtctcctcggtggaggtggacgccgtgcacaagcactacctgagcctcctctcctacgtgggctgtgtcgtctctgccctggcctgccttgtcaccattgccgcctacctctgctccagggtgcccctgccgtgcaggaggaaacctcgggactacaccatcaaggtgcacatgaacctgctgctggccgtcttcctgctggacacgagcttcctgctcagcgagccggtggccctgacaggctctgaggctggctgccgagccagtgccatcttcctgcacttctccctgctcacctgcctttcctggatgggcctcgaggggtacaacctctaccgactcgtggtggaggtctttggcacctatgtccctggctacctactcaagctgagcgccatgggctggggcttccccatctttctggtgacgctggtggccctggtggatgtggacaactatggccccatcatcttggctgtgcataggactccagagggcgtcatctacccttccatgtgctggatccgggactccctggtcagctacatcaccaacctgggcctcttcagcctggtgtttctgttcaacatggccatgctagccaccatggtggtgcagatcctgcggctgcgcccccacacccaaaagtggtcacatgtgctgacactgctgggcctcagcctggtccttggcctgccctgggccttgatcttcttctcctttgcttctggcaccttccagcttgtcgtcctctaccttttcagcatcatcacctccttccaaggcttcctcatcttcatctggtactggtccatgcggctgcaggcccggggtggcccctcccctctgaagagcaactcagactgcgccaggctccccatcagctcgggcagcacctcgtccagccgcatctaggcctccagcccacctgcccatgtgatgaagcagagatgcggcctcgtcgcacactgcctgtggcccccgagccaggcccagccccaggccagtcagccgcagactttggaaagcccaacgaccatggagagatgggccgttgccatggtggacggactcccggggctggggcttttgaattggccttggggactactcggctctcactcagctcccacgggactcagaagtgcgccgccatgctgcctagggtactgtccccacatctgtcccaacccagctggaggcctggtctctccttacaacccctgggcccagcctcattgctgggggccaggccttggatcttgagggtctggcacatccttaatcctgtgcccctgcctgggacagaaatgtggctccagttgctctgtctctcgtggtcaccctgagggcactctgcatcctctgtcattttaacctcaggtggcacccagggcgaatggggcccagggcagaccttcagggccagagccctggcggaggagaggccctttgccaggagcacagcagcagctcgcctacctctgagcccg

SEQ ID NO: 518 - protein, 693 aa, Homo sapiens
MTPQSLLQTTLFLLSLLFLVQGAHGRGHREDFRFCSQRNQTHRSSLHYKPTPDLRISIENSEEALTVHAPFPAAHPASRSFPDPRGLYHFCLYWNRHAGRLHLLYGKRDFLLSDKASSLLCFQHQEESLAQGPPLLATSVTSWWSPQNISLPSAASFTFSFHSPPHTAAHNASVDMCELKRDLQLLSQFLKHPQKASRRPSAAPASQQLQSLESKLTSVRFMGDMVSFEEDRINATVWKLQPTAGLQDLHIHSRQEEEQSEIMEYSVLLPRTLFQRTKGRSGEAEKRLLLVDFSSQALFQDKNSSQVLGEKVLGIVVQNTKVANLTEPVVLTFQHQLQPKNVTLQCVFWVEDPTLSSPGHWSSAGCETVRRETQTSCFCNHLTYFAVLMVSSVEVDAVHKHYLSLLSYVGCVVSALACLVTIAAYLCSRVPLPCRRKPRDYTIKVHMNLLLAVFLLDTSFLLSEPVALTGSEAGCRASAIFLHFSLLTCLSWMGLEGYNLYRLVVEVFGTYVPGYLLKLSAMGWGFPIFLVTLVALVDVDNYGPIILAVHRTPEGVIYPSMCWIRDSLVSYITNLGLFSLVFLFNMAMLATMVVQILRLRPHTQKWSHVLTLLGLSLVLGLPWALIFFSFASGTFQLVVLYLFSIITSFQGFLIFIWYWSMRLQARGGPSPLKSNSDCARLPISSGSTSSSRI

SEQ ID NO: 519 - DNA, 1662 bp, Homo sapiens
atgaagctgggatcgagcagggcagggcctgggagaggaagcgcgggactcctgcctggcgtccacgagctgcccatgggcatccctgccccctgggggaccagtcctctctccttccacaggaagtgctctctctgggcccctgggaggcccttcctcactctggtcctgctggtttccatcaagcaagttacaggatccctccttgaggaaacgactcggaagtgggctcagtacaaacaggcatgtctgagagacttactcaaggaaccttctggcatattttgtaacgggacatttgatcagtacgtgtgttggcctcattcttctcctggaaatgtctctgtaccctgcccttcatacttaccttggtggagtgaagagagctcaggaagggcctacagacactgcttggctcaggggacttggcagacgatagagaacgccacggatatttggcaggatgactccgaatgctccgagaaccacagcttcaagcaaaacgtggaccgttatgccttgctgtcaaccttgcagctgatgtacaccgtgggatactccttctctcttatctccctcttcctggctctcaccctcctcttgtttcttcgaaaactccactgcacgcgcaactacatccacatgaacttgtttgcttctttcatcctgagaaccctggctgtactggtgaaggacgtcgtcttctacaactcttactccaagaggcctgacaatgagaatgggtggatgtcctacctgtcagagatgtccacctcctgccgctcagtccaggttctcttgcattactttgtgggtgccaattacttatggctgctggttgaaggcctctacctccacacgctgctggagcccacagtgcttcctgagaggcggctgtggcccagatacctgctgttgggttgggccttccctgtgctatttgttgtaccctggggtttcgcccgtgcacacctggagaacacagggtgctggacaacaaatgggaataagaaaatctggtggatcatccgaggacccatgatgctctgtgtaacagtcaatttcttcatcttcctgaaaattctcaagcttctcatttctaagctcaaagctcatcaaatgtgcttcagagattataaatacagattggcaaaatcaacactggtcctcattcctttattgggcgttcatgagatcctcttctctttcatcactgatgatcaagttgaaggatttgcaaaacttatacgacttttcattcagttgacactgagctcctttcatgggttcctggtggccttgcagtatggttttgccaatggagaagtgaaggctgagctgcggaaatactgggtccgcttcttgctagcccgccactcaggctgcagagcctgtgtcctggggaaggacttccggttcctaggaaaatgtcccaagaagctctcggaaggagatggcgctgagaagcttcggaagctgcagccctcacttaacagtgggcggctcctacatctagccatgcgaggtcttggggagctgggcgcccagccccaacaggaccatgcacgctggccccggggcagcagcctgtccgagtgcagtgagggggatgtcaccatggccaacaccatggaggagattctggaagagagtgagatctag

SEQ ID NO: 520 - protein, 553 aa, Homo sapiens
MKLGSSRAGPGRGSAGLLPGVHELPMGIPAPWGTSPLSFHRKCSLWAPGRPFLTLVLLVSIKQVTGSLLEETTRKWAQYKQACLRDLLKEPSGIFCNGTFDQYVCWPHSSPGNVSVPCPSYLPWWSEESSGRAYRHCLAQGTWQTIENATDIWQDDSECSENHSFKQNVDRYALLSTLQLMYTVGYSFSLISLFLALTLLLFLRKLHCTRNYIHMNLFASFILRTLAVLVKDVVFYNSYSKRPDNENGWMSYLSEMSTSCRSVQVLLHYFVGANYLWLLVEGLYLHTLLEPTVLPERRLWPRYLLLGWAFPVLFVVPWGFARAHLENTGCWTTNGNKKIWWIIRGPMMLCVTVNFFIFLKILKLLISKLKAHQMCFRDYKYRLAKSTLVLIPLLGVHEILFSFITDDQVEGFAKLIRLFIQLTLSSFHGFLVALQYGFANGEVKAELRKYWVRFLLARHSGCRACVLGKDFRFLGKCPKKLSEGDGAEKLRKLQPSLNSGRLLHLAMRGLGELGAQPQQDHARWPRGSSLSECSEGDVTMANTMEEILEESEI

SEQ ID NO: 521 - DNA, 5659 bp, Homo sapiens
tttttttttttttttttcctaatttttggtcggcggcggtgctgggccaggggaaggaagggacacggaggccgccctcgtcccgccacctcctacccgcttccccccagccccggctccgggagatgtgccgggcggggggcccgggttcgccgagccgcaggagagacacgctgggccgaccccagagaggcgctggacaggctggtggtccaggccgtggtgcctgccaggtgatgtggggcaaagccccccgcacaggccactgagagctccggacacgcacccggctgccaccatggcccgcctagccgcagtgctctggaatctgtgtgtcaccgccgtcctggtcacctcggccacccaaggcctgagccgggccgggctcccgttcgggctgatgcgccgggagctggcgtgtgaaggctaccccatcgagctgcggtgccccggcagcgacgtcatcatggtggagaatgccaactacgggcgcacggacgacaagatttgcgatgctgaccctttccagatggagaatgtgcagtgctacctgccggacgccttcaagatcatgtcacagaggtgtaacaaccgcacccagtgcgtggtggtcgccggctcggatgcctttcctgacccctgtcctgggacctacaagtacctggaggtgcagtacgactgtgtcccctacaaagtggagcagaaagtcttcgtgtgcccagggaccctgcagaaggtgctggagcccacctcgacacacgagtcagagcaccagtctggcgcatggtgcaaggacccgctgcaggcgggtgaccgcatctacgtgatgccctggatcccctaccgcacggacacactgactgagtatgcctcgtgggaggactacgtggccgcccgccacaccaccacctaccgcctgcccaaccgcgtggatggcacaggctttgtggtctacgatggtgccgtcttctacaacaaggagcgcacgcgcaacatcgtcaagtatgacctacggacgcgcatcaagagcggggagacggtcatcaataccgccaactaccatgacacctcgccctaccgctggggcggaaagaccgacattgacctggcggtggacgagaacgggctgtgggtcatctacgccactgagggcaacaacgggcggctggtggtgagccagctgaacccctacacactgcgctttgagggcacgtgggagacgggttacgacaagcgctcggcatccaacgccttcatggtgtgtggggtcctgtacgtcctgcgctccgtgtacgtggatgatgacagcgaggcggctggcaaccgcgtggactatgccttcaacaccaatgccaaccgcgaggagcctgtcagcctcaccttccccaacccctaccagttcatctcctccgttgactacaaccctcgcgacaaccagctgtacgtctggaacaactatttcgtggtgcgctacagcctggagttcgggccgcccgaccccagtgctggcccagccacttccccacccctcagcacgaccaccacagccaggcccacgcccctcaccagcacagcctcgcccgcagccaccaccccgctccgccgggcacccctcaccacgcacccagtgggtgccatcaaccagctgggacctgatctgcctccagccacagccccagtccccagcacccggcggcccccagccccgaatctacacgtgtcccctgagctcttctgcgagccccgagaggtacggcgggtccagtggccggccacccagcagggcatgctggtggagaggccctgccccaaggggactcgaggaattgcctccttccagtgtctaccagccttggggctctggaacccccggggccctgacctcagcaactgcacctccccctgggtcaaccaggtggcccagaagatcaagagtggggagaacgcggccaacatcgccagcgagctggcccgacacacccggggctccatctacgcgggggacgtctcctcctctgtgaagctgatggagcagctgctggacatcctggatgcccagctgcaggccctgcggcccatcgagcgcgagtcagccggcaagaactacaacaagatgcacaagcgagagagaacttgtaaggattatatcaaggccgtggtggagacagtggacaatctgctccggccagaagctctggagtcctggaaggacatgaatgccacggagcaggtgcacacggccaccatgctcctcgacgtcctggaggagggcgccttcctgctggccgacaatgtcagggagcctgcccgcttcctggctgccaaggagaacgtggtcctggaggtcacagtcctgaacacagagggccaggtgcaggagctggtgttcccccaggaggagtacccgagaaagaactccatccagctgtctgccaaaaccatcaagcagaacagccgcaatggggtggtcaaagttgtcttcatcctctacaacaacctgggcctcttcctgtccacggagaatgccacagtgaagctggccggcgaagcaggcccgggtggccctgggggcgcctctctagtggtgaactcacaggtcatcgcagcatccatcaacaaggagtccagccgcgtcttcctcatggaccctgtcatcttcaccgtggcccacctggaggacaagaaccacttcaatgctaactgctccttctggaactactcggagcgttccatgctgggctattggtcgacccaaggctgccgcctggtggagtccaacaagacccataccacgtgtgcctgcagccacctcaccaacttcgctgtgctcatggctcaccgtgagatctaccagggccgcatcaacgagctgctgctgtcggtcatcacctgggtgggcattgtgatctccctggtctgcttggccatctgcatctccaccttctgcttcctgcgggggctgcagaccgaccgcaacaccatccacaagaacctgtgcatcaacctcttcctggctgagctgctcttcctggtcgggatcgacaagactcagtatgagattgcctgccccatcttcgccggcctgctgcactatttcttcctggctgccttctcctggctgtgcctggagggcgtgcacctctacctgctactagtggaggtgtttgagagcgagtattcccgcaccaagtactactacctgggtggctactgcttcccggccctggtggtgggcatcgcggctgccattgactaccgcagctacggcaccgagaaggcctgctggctccgagtggacaattacttcatctggagtttcatcgggccagtctccttcgttatcgtggtcaacctggtgttcctcatggtgaccctgcacaagatgatccgaagctcatctgtgctcaagcccgactccagccgcctggacaacattaaatcctgggcgctgggggccatcgcgctgctgttcctgctgggcctcacctgggctttcggcctcctcttcatcaacaaggagtcggtggtcatggcctatctcttcaccaccttcaacgccttccagggggtcttcatcttcgtctttcactgcgccttacagaagaaggtgcacaaggagtacagcaagtgcctgcgtcactcctactgctgcatccgctccccacccgggggcactcacggatccctcaagacctcagccatgcgaagcaacacccgctactacacagggacccagagccgaattcggaggatgtggaatgacactgtgaggaaacagacggagtcctccttcatggcgggtgacatcaacagcacccccaccctgaaccgaggtaccatggggaaccacctgctgaccaaccccgtgctgcagccccgtgggggcaccagtccctacaacaccctcatcgccgagtcagtgggcttcaatccctcctcgccccctgtcttcaactccccagggagctaccgggaacccaagcaccccttgggaggccgggaagcctgtggcatggacaccctgcccctgaacggcaacttcaataacagttactccttgcgaagtggggatttccctcccggggatgggggccctgagccgccccgaggccggaacctagccgatgcggcggcctttgagaagatgatcatctcagagctggtgcacaacaacctgcgggggagcagcagcgcggccaagggccctccaccgcctgagccccctgtgccacctgtgccagggggcgggggcgaggaagaggcgggcgggcccgggggtgctgaccgggccgagattgaacttctctataaggccctggaggagcctctgctgctgccccgggcccagtcggtgctgtaccagagcgatctggacgagtcggagagctgcacggccgaggacggcgccaccagccggcccctctcctcccctcctggccgggactccctctatgccagcggggccaacctgcgggactcaccctcctacccggacagcagccctgaggggcccagtgaggccctgcccccaccccctcccgcaccccccggcccccccgaaatctactacacctcgcgcccgccagccctggtggcccggaatcccctgcagggctactaccaggtgcggcgtcctagccacgagggctacctggcagccccaggccttgaggggccagggcccgatggggacgggcagatgcagctggtcaccagtctctgagggcacctcatggaccaggggctggtggcccaggccagggagggaaccctgggcagggctctggtgggagagggagacagatggaggcagtggctggtgggccactctctccaggtgcccctcagccatgggccctacagtcccctcaggggactctaacctgggggcctgaggtgccagggttcacagacagggtttcccaccagccacacgcaccagctctatttgggggaagtgtagtgaggaggagcccagaggaccccaggggagtgaggagggagaacttggaagggtgcagcccacttccagactctcccctctcccacccttctaccctgtgaagggaaatgagggctttagtttcctgggcagggaggggcagcttctgaggttgccaaaggcccccactggatggaacctgttagctgctcctctccgcagccagaaatgctgccggctgcacccagagggagcagtgaggcaggacagatggacaggttcctcctgcgctgtaattccctgctccctggagactgggaaaaggccgcagggcagggggactgggcggtggtggctggtggtttaaaggttgaactttctctgaagctcctttccccttgctcttggtccctgccccgcaagcaaacctgccccctctgcctcccagtgcacccaatgaccccctcccttggggcgactcctgatgaagcacaactccccgcagggcccccagcccacaggggtggccatatttgggcagttcccagtcctgtgggctcggctatctggggagcagattttgggtctggatctccctggggagtgggtcctgggcttggatctttccctagggggccctcttactccttcctctctcctcctccttccccattgctgtaaatatttcaacgaaatggaaaagaaaaaaaaaaagac

SEQ ID NO: 522 - protein, 1474 aa, Homo sapiens
MARLAAVLWNLCVTAVLVTSATQGLSRAGLPFGLMRRELACEGYPIELRCPGSDVIMVENANYGRTDDKICDADPFQMENVQCYLPDAFKIMSQRCNNRTQCVVVAGSDAFPDPCPGTYKYLEVQYDCVPYKVEQKVFVCPGTLQKVLEPTSTHESEHQSGAWCKDPLQAGDRIYVMPWIPYRTDTLTEYASWEDYVAARHTTTYRLPNRVDGTGFVVYDGAVFYNKERTRNIVKYDLRTRIKSGETVINTANYHDTSPYRWGGKTDIDLAVDENGLWVIYATEGNNGRLVVSQLNPYTLRFEGTWETGYDKRSASNAFMVCGVLYVLRSVYVDDDSEAAGNRVDYAFNTNANREEPVSLTFPNPYQFISSVDYNPRDNQLYVWNNYFVVRYSLEFGPPDPSAGPATSPPLSTTTTARPTPLTSTASPAATTPLRRAPLTTHPVGAINQLGPDLPPATAPVPSTRRPPAPNLHVSPELFCEPREVRRVQWPATQQGMLVERPCPKGTRGIASFQCLPALGLWNPRGPDLSNCTSPWVNQVAQKIKSGENAANIASELARHTRGSIYAGDVSSSVKLMEQLLDILDAQLQALRPIERESAGKNYNKMHKRERTCKDYIKAVVETVDNLLRPEALESWKDMNATEQVHTATMLLDVLEEGAFLLADNVREPARFLAAKENVVLEVTVLNTEGQVQELVFPQEEYPRKNSIQLSAKTIKQNSRNGVVKVVFILYNNLGLFLSTENATVKLAGEAGPGGPGGASLVVNSQVIAASINKESSRVFLMDPVIFTVAHLEDKNHFNANCSFWNYSERSMLGYWSTQGCRLVESNKTHTTCACSHLTNFAVLMAHREIYQGRINELLLSVITWVGIVISLVCLAICISTFCFLRGLQTDRNTIHKNLCINLFLAELLFLVGIDKTQYEIACPIFAGLLHYFFLAAFSWLCLEGVHLYLLLVEVFESEYSRTKYYYLGGYCFPALVVGIAAAIDYRSYGTEKACWLRVDNYFIWSFIGPVSFVIVVNLVFLMVTLHKMIRSSSVLKPDSSRLDNIKSWALGAIALLFLLGLTWAFGLLFINKESVVMAYLFTTFNAFQGVFIFVFHCALQKKVHKEYSKCLRHSYCCIRSPPGGTHGSLKTSAMRSNTRYYTGTQSRIRRMWNDTVRKQTESSFMAGDINSTPTLNRGTMGNHLLTNPVLQPRGGTSPYNTLIAESVGFNPSSPPVFNSPGSYREPKHPLGGREACGMDTLPLNGNFNNSYSLRSGDFPPGDGGPEPPRGRNLADAAAFEKMIISELVHNNLRGSSSAAKGPPPPEPPVPPVPGGGGEEEAGGPGGADRAEIELLYKALEEPLLLPRAQSVLYQSDLDESESCTAEDGATSRPLSSPPGRDSLYASGANLRDSPSYPDSSPEGPSEALPPPPPAPPGPPEIYYTSRPPALVARNPLQGYYQVRRPSHEGYLAAPGLEGPGPDGDGQMQLVTSL

SEQ ID NO: 523 - DNA, 10531 bp, Homo sapiens
taggagccggaggaggagccgccgccgccgttgacccggccgccggccgggagctgggagagatgcggagcccggccaccggcgtccccctcccaacgccgccgccgccgctgctgctgctgttgctgctgctgctgccgccgccactattgggagaccaagtggggccctgtcgttccttggggtccaggggacgaggctcttcgggggcctgcgcccccatgggctggctctgtccatcctcagcgtcgaacctctggctctacaccagccgctgcagggatgcgggcactgagctgactggccacctggtaccccaccacgatggcctgagggtttggtgtccagaatccgaggcccatattcccctaccaccagctcctgaaggctgcccctggagctgtcgcctcctgggcattggaggccacctttccccacagggcaagctcacactgcccgaggagcacccgtgcttaaaggctccacggctcagatgccagtcctgcaagctggcacaggcccccgggctcagggcaggggaaaggtcaccagaagagtccctgggtgggcgtcggaaaaggaatgtaaatacagccccccagttccagccccccagctaccaggccacagtgccggagaaccagccagcaggcacccctgttgcatccctgagggccatcgacccggacgagggtgaggcaggtcgactggagtacaccatggatgccctctttgatagccgctccaaccagttcttctccctggacccagtcactggtgcagtaaccacagccgaggagctggatcgtgagaccaagagcacccacgtcttcagggtcacggcgcaggaccacggcatgccccgacgaagtgccctggctacactcaccatcttggttactgacaccaatgaccatgaccctgtgttcgagcagcaggagtacaaggagagcctcagggagaacctggaggttggctatgaggtgctcactgtcagggccacggatggtgatgcccctcccaatgccaatattctgtaccgcctgctggaggggtctgggggcagcccctctgaagtctttgagatcgaccctcgctctggggtgatccgaacccgtggccctgtggatcgggaagaggtggaatcctaccagctgacggtagaggcaagtgaccagggtcgggacccgggtcctcggagtaccacagccgctgttttcctttctgtggaggatgacaatgataatgccccccagtttagtgagaagcgctatgtggtccaggtgagggaggatgtgactccaggggccccagtactccgagtcacagcctcggatcgagacaaggggagcaatgccgtggtgcactatagcatcatgagtggcaatgctcggggacagttttatctggatgcccagactggagctctggatgtggtgagccctcttgactatgagacgaccaaggagtacaccctacgggtgcgagcacaggatggtggccgtcccccactctctaatgtctctggcttggtgacagtacaggtcctggatatcaacgacaatgcccccatcttcgtcagcacccctttccaggctactgtcctggagagcgtccccttaggctacctggttctccatgtccaggctatcgacgctgatgctggtgacaatgcccgcctggaataccgccttgctggggtgggacatgacttccccttcaccatcaacaatggcacaggctggatctctgtggctgctgaactggaccgggaggaagttgatttctacagctttggggtagaagctcgagaccatggcactccagcactcactgcctcggccagtgtcagcgtgactgtcctggatgtcaacgacaacaatccaacctttacccaaccagagtacacagtgcggctcaatgaggatgcagctgtgggcaccagcgtggtgacggtgtcagctgtggaccgtgatgctcatagtgtcatcacctaccagatcaccagtggcaatactcgaaaccgcttctccatcaccagccaaagtggtggtgggctggtatcccttgccctgccactggactacaaacttgagcggcagtatgtgttggctgttaccgcctccgatggcactcggcaggacacggcacagattgtggtgaatgtcaccgacgccaacacccatcgtcctgtctttcagagctcccactatacagtgaatgttaatgaggaccggccggcaggcaccacggtggtgctgatcagcgccacggatgaggacacaggtgagaatgcccgcatcacctacttcatggaggacagcatcccccagttccgcatcgatgcagacacgggggctgtcaccacccaggctgagctggactacgaagaccaagtgtcttacaccctggccattactgctcgggacaatggcattccccagaagtccgacaccacctacctggagatcctggtgaacgacgtgaatgacaatgcccctcagttcctgcgagactcctaccagggcagtgtctatgaggatgtgccacccttcactagcgtcctgcagatctcagccactgatcgtgattctggacttaatggcagggtcttctacaccttccaaggaggcgacgatggagacggtgactttattgttgagtccacgtcaggcatcgtgcgaacgctacggaggctggatcgagagaacgtggcccagtatgtcttgcgggcatatgcagtggacaaggggatgcccccagcccgcacacctatggaagtgacagtcactgtgttggatgtgaatgacaatccccctgtctttgagcaggatgagtttgatgtgtttgtggaagagaacagccccattgggctagccgtggcccgggtcacagccactgaccccgatgaaggcaccaatgcccagattatgtaccagattgtggagggcaacatccctgaggtcttccagctggacatcttctccggggagctgacagccctggtagacttagactacgaggaccggcctgagtacgtcctggtcatccaggccacgtcagctcctctggtgagccgggctacagtccacgtccgcctccttgaccgcaatgacaacccaccagtgctgggcaactttgagatccttttcaacaactatgtcaccaatcgctcaagcagcttccctgggggtgccattggccgagtacctgcccatgaccctgatatctcagatagtctgacttacagctttgagcggggaaatgaactcagcctggtcctgctcaatgcctccacgggtgagctgaagctaagccgcgcactggacaacaaccggcctctggaggccatcatgagcgtgctggtgtcagacggcgtacacagcgtgaccgcccagtgcgcgctgcgtgtgaccatcatcaccgatgagatgctcacccacagcatcacgctgcgcctggaggacatgtcacccgagcgcttcctgtcaccactgctaggcctcttcatccaggcggtggccgccacgctggccacgccaccggaccacgtggtggtcttcaacgtacagcgggacaccgacgcccccgggggccacatcctcaacgtgagcctgtcggtgggccagccgccagggcccgggggcgggccgcccttcctgccctctgaggacctgcaggagcgcctatacctcaaccgcagcctgctgacggccatctcggcacagcgcgtgctgcccttcgacgacaacatctgcctgcgggagccctgcgagaactacatgcgctgcgtgtcggtgctgcgcttcgactcctccgcgcccttcatcgcctcctcctccgtgctcttccggcccatccaccccgtcggagggctgcgctgccgctgcccgcccggcttcacgggtgactactgcgagaccgaggtggacctctgctactcgcggccctgtggcccccacgggcgctgccgcagccgcgagggcggctacacctgcctctgtcgtgatggctacacgggtgagcactgtgaggtgagtgctcgctcaggccgttgcaccccgggtgtctgcaagaatgggggcacctgtgtcaacctgctggtgggcggtttcaagtgcgattgcccatctggagacttcgagaagccctactgccaggtgaccacgcgcagcttccccgcccactccttcatcacctttcgcggcctgcgccagcgtttccacttcaccctggccctctcgtttgccacaaaggagcgcgacgggttgctgttgtacaatgggcgtttcaatgagaagcatgactttgtggccctcgaggtgatccaggagcaggtccagctcaccttctctgcaggggagtcaaccaccacggtgtccccattcgtgcccggaggagtcagtgatggccagtggcatacggtgcagctgaaatactacaataagccactgttgggtcagacagggctcccacagggcccatcagagcagaaggtggctgtggtgaccgtggatggctgtgacacaggagtggccttgcgcttcggatctgtcctgggcaactactcctgtgctgcccagggcacccagggtggcagcaagaagtctctggatctgacggggcccctgctactaggcggggtgcctgacctgcccgagagcttcccagtccgaatgcggcagttcgtgggctgcatgcggaacctgcaggtggacagccggcacatagacatggctgacttcattgccaacaatggcaccgtgcctggctgccctgccaagaagaacgtgtgtgacagcaacacttgccacaatgggggcacttgcgtgaaccagtgggacgcgttcagctgcgagtgccccctgggctttgggggcaagagctgcgcccaggaaatggccaatccacagcacttcctgggcagcagcctggtggcctggcatggcctctcgctgcccatctcccaaccctggtacctcagcctcatgttccgcacgcgccaggccgacggtgtcctgctgcaggccatcaccagggggcgcagcaccatcaccctacagctacgagagggccacgtgatgctgagcgtggagggcacagggcttcaggcctcctctctccgtctggagccaggccgggccaatgacggtgactggcaccatgcacagctggcactgggagccagcggggggcctggccatgccattctgtccttcgattatgggcagcagagagcagagggcaacctgggcccccggctgcatggtctgcacctgagcaacataacagtgggcggaatacctgggccagccggcggtgtggcccgtggctttcggggctgtttgcagggtgtgcgggtgagcgatacgccagagggggttaacagcctggatcccagccatggggagagcatcaacgtggagcaaggctgtagcctgcctgacccttgtgactcaaacccgtgtcctgctaacagctattgcagcaacgactgggacagctattcctgcagctgtgatccaggttactatggtgacaactgtactaatgtgtgtgacctgaacccgtgtgagcaccagtctgtgtgtacccgcaagcccagtgccccccatggctatacctgcgagtgtcccccaaattaccttgggccatactgtgagaccaggattgaccagccttgtccccgtggctggtggggacatcccacatgtggcccatgcaactgtgatgtcagcaaaggctttgacccagactgcaacaagacaagcggcgagtgccactgcaaggagaaccactaccggcccccaggcagccccacctgcctcttgtgtgactgctaccccacaggctccttgtccagagtctgtgaccctgaggatggccagtgtccatgcaagccaggtgtcatcgggcgtcagtgtgaccgctgtgacaacccttttgctgaggtcaccaccaatggctgtgaagtgaattatgacagctgcccacgagcgattgaggctgggatctggtggccccgtacccgcttcgggctgcctgctgctgctccctgtcccaaaggctcctttgggactgctgtgcgccactgtgatgagcacagggggtggctccccccaaacctcttcaactgcacgtccatcaccttctcagaactgaagggcttcgctgagcggctacagcggaatgagtcaggcctagactcagggcgctcccagcagctagccctgctcctgcgcaacgccacgcagcacacagctggctacttcggcagcgacgtcaaggtggcctaccagctggccacgcggctgctggcccacgagagcacccagcggggctttgggctgtctgccacacaggacgtgcacttcactgagaatctgctgcgggtgggcagcgccctcctggacacagccaacaagcggcactgggagctgatccagcagacagagggtggcaccgcctggctgctccagcactatgaggcctacgccagtgccctggcccagaacatgcggcacacctacctaagccccttcaccatcgtcacgcccaacattgtcatctccgtagtgcgcttggacaaagggaactttgctggggccaagctgccccgctacgaggccctgcgtggggagcagcccccggaccttgagacaacagtcattctgcctgagtctgtcttcagagagacgccccccgtggtcaggcccgcaggccccggagaggcccaggagccagaggagctggcacggcgacagcgacggcacccggagctgagccagggtgaggctgtggccagcgtcatcatctaccgcaccctggccgggctactgcctcataactatgaccctgacaagcgcagcttgagagtccccaaacgcccgatcatcaacacacccgtggtgagcatcagcgtccatgatgatgaggagcttctgccccgggccctggacaaacccgtcacggtgcagttccgcctgctggagacagaggagcggaccaagcccatctgtgtcttctggaaccattcaatcctggtcagtggcacaggtggctggtcggccagaggctgtgaagtcgtcttccgcaatgagagccacgtcagctgccagtgcaaccacatgacgagcttcgctgtgctcatggacgtttctcggcgggagaatggggagatcctgccactgaagacactgacatacgtggctctaggtgtcaccttggctgcccttctgctcaccttcttcttcctcactctcttgcgtatcctgcgctccaaccaacacggcatccgacgtaacctgacagctgccctgggcctggctcagctggtcttcctcctgggaatcaaccaggctgacctcccttttgcctgcacagtcattgccatcctgctgcacttcctgtacctctgcaccttttcctgggctctgctggaggccttgcacctgtaccgggcactcactgaggtgcgcgatgtcaacaccggccccatgcgcttctactacatgctgggctggggcgtgcctgccttcatcacagggctagccgtgggcctggaccccgagggctacgggaaccctgacttctgctggctctccatctatgacacgctcatctggagttttgctggcccggtggcctttgccgtctcgatgagtgtcttcctgtacatcctggcggcccgggcctcctgtgctgcccagcggcagggctttgagaagaaaggtcctgtctcgggcctgcagccctccttcgccgtcctcctgctgctgagcgccacgtggctgctggcactgctctctgtcaacagcgacaccctcctcttccactacctctttgctacctgcaattgcatccagggccccttcatcttcctctcctatgtggtgcttagcaaggaggtccggaaagcactcaagcttgcctgcagccgcaagcccagccctgaccctgctctgaccaccaagtccaccctgacctcgtcctacaactgccccagcccctacgcagatgggcggctgtaccagccctacggagactcggccggctctctgcacagcaccagtcgctcgggcaagagtcagcccagctacatccccttcttgctgagggaggagtccgcactgaaccctggccaagggccccctggcctgggggatccaggcagcctgttcctggaaggtcaagaccagcagcatgatcctgacacggactccgacagtgacctgtccttagaagacgaccagagtggctcctatgcctctacccactcatcagacagtgaggaggaagaagaggaggaggaagaggaggccgccttccctggagagcagggctgggatagcctgctggggcctggagcagagagactgcccctgcacagtactcccaaggatgggggcccagggcctggcaaggccccctggccaggagactttgggaccacagcaaaagagagtagtggcaacggggcccctgaggagcggctgcgggagaatggagatgccctgtctcgagaggggtccctaggcccccttccaggctcttctgcccagcctcacaaaggcatccttaagaagaagtgtctgcccaccatcagcgagaagagcagcctcctgcggctccccctggagcaatgcacagggtcttcccggggctcctccgctagtgagggcagccggggcggcccccctccccgcccaccgccccggcagagcctccaggagcagctgaacggggtcatgcccatcgccatgagcatcaaggcaggcacggtggatgaggactcgtcaggctccgaatttctcttctttaacttcctgcattaaccctgggccgtggttcctacgcccgaggctcccttcccttccccagccgcactcatgccctgctcctgtcttgtgctttatcctgccccgctccccatcgcctgcccgcagcagcgacgaaacgtccatctgaggagcctgggccttgccgggaggggtactcaccccacctaaggccatctagtgccaactccccccccaccattcccctcactgcactttggacccctggggccaacatctccaagacaaagtttttcagaaaagaggaaaaaaagaatttaaaaaaggatctccactcttcatgacttcagggattcattttttttatacgctggaaattgactcccctttcccttcccaaagaggataggacctcccaggatgcttcccagcctctcctcagtttcccatctgctgtgcctctgggaggagagggactcctggggggcctgcccctcatacgccatcaccaaaaggaaaggacaaagccacacgcagccagggcttcacacccttcaggctgcacccgggcaggcctcagaacggtgaggggccagggcaaagggtgtgtctcgtcctgcccgcactgcctctcccaggaactggaaaagccctgtccggtgagggggcagaaggactcagcgcccctggacccccaaatgctgcatgaacacattttcaggggagcctgtgcccccaggcgggggtcgggcagccccagcccctctccttttcctggactctggccgtgcgcggcagcccaggtgtttgctcagttgctgacccaaaagtgcttcatttttcgtgcccgccccgcgccccgggcaggccagtcatgtgttaagttgcgcttctttgctgtgatgtgggtgggggaggaagagtaaacacagtgctggctcggctgccctgagggtgctcaatcaagcacaggtttcaagtctgggttctggtgtccactcacccaccccaccccccaaaatcagacaaatgctactttgtctaacctgctgtggcctctgagacatgttctatttttaaccccttcttggaattggctctcttcttcaaaggaccaggtcctgttcctctttctccccgactccaccccagctccctgtgaagagagagttaatatatttgttttatttatttgctttttgcgttgggatgggttcgtgtccagtcccgggggtctgatatggccatcacaggctgggtgttcccagcagccctggcttgggggcttgacgcccttccccttgccccaggccatcatctccccacctctcctcccctctcctcagttttgccgactgcttttcatctgagtcaccatttactccaagcatgtattccagacttgtcactgactttccttctggagcaggtggctagaaaaagaggctgtgggcaggaaagaaaggctcctgtttctcatttgtgaggccagcctctggcttttctgccgtggattctccccctgtcttctcccctcagcaattcctgcaaagggttaaaaatttaactggtttttactactgatgacttaaaaaaaatacaaagatgctggatgctaacttgatactaaccatcagattgtacagtttggttgttgctgtaaatatggtagcgttttgttgttgttgttttttcatgccccatactactgaataaactagttctgtgcgggt

SEQ ID NO: 524 - protein, 2923 aa, Homo sapiens
MRSPATGVPLPTPPPPLLLLLLLLLPPPLLGDQVGPCRSLGSRGRGSSGACAPMGWLCPSSASNLWLYTSRCRDAGTELTGHLVPHHDGLRVWCPESEAHIPLPPAPEGCPWSCRLLGIGGHLSPQGKLTLPEEHPCLKAPRLRCQSCKLAQAPGLRAGERSPEESLGGRRKRNVNTAPQFQPPSYQATVPENQPAGTPVASLRAIDPDEGEAGRLEYTMDALFDSRSNQFFSLDPVTGAVTTAEELDRETKSTHVFRVTAQDHGMPRRSALATLTILVTDTNDHDPVFEQQEYKESLRENLEVGYEVLTVRATDGDAPPNANILYRLLEGSGGSPSEVFEIDPRSGVIRTRGPVDREEVESYQLTVEASDQGRDPGPRSTTAAVFLSVEDDNDNAPQFSEKRYVVQVREDVTPGAPVLRVTASDRDKGSNAVVHYSIMSGNARGQFYLDAQTGALDVVSPLDYETTKEYTLRVRAQDGGRPPLSNVSGLVTVQVLDINDNAPIFVSTPFQATVLESVPLGYLVLHVQAIDADAGDNARLEYRLAGVGHDFPFTINNGTGWISVAAELDREEVDFYSFGVEARDHGTPALTASASVSVTVLDVNDNNPTFTQPEYTVRLNEDAAVGTSVVTVSAVDRDAHSVITYQITSGNTRNRFSITSQSGGGLVSLALPLDYKLERQYVLAVTASDGTRQDTAQIVVNVTDANTHRPVFQSSHYTVNVNEDRPAGTTVVLISATDEDTGENARITYFMEDSIPQFRIDADTGAVTTQAELDYEDQVSYTLAITARDNGIPQKSDTTYLEILVNDVNDNAPQFLRDSYQGSVYEDVPPFTSVLQISATDRDSGLNGRVFYTFQGGDDGDGDFIVESTSGIVRTLRRLDRENVAQYVLRAYAVDKGMPPARTPMEVTVTVLDVNDNPPVFEQDEFDVFVEENSPIGLAVARVTATDPDEGTNAQIMYQIVEGNIPEVFQLDIFSGELTALVDLDYEDRPEYVLVIQATSAPLVSRATVHVRLLDRNDNPPVLGNFEILFNNYVTNRSSSFPGGAIGRVPAHDPDISDSLTYSFERGNELSLVLLNASTGELKLSRALDNNRPLEAIMSVLVSDGVHSVTAQCALRVTIITDEMLTHSITLRLEDMSPERFLSPLLGLFIQAVAATLATPPDHVVVFNVQRDTDAPGGHILNVSLSVGQPPGPGGGPPFLPSEDLQERLYLNRSLLTAISAQRVLPFDDNICLREPCENYMRCVSVLRFDSSAPFIASSSVLFRPIHPVGGLRCRCPPGFTGDYCETEVDLCYSRPCGPHGRCRSREGGYTCLCRDGYTGEHCEVSARSGRCTPGVCKNGGTCVNLLVGGFKCDCPSGDFEKPYCQVTTRSFPAHSFITFRGLRQRFHFTLALSFATKERDGLLLYNGRFNEKHDFVALEVIQEQVQLTFSAGESTTTVSPFVPGGVSDGQWHTVQLKYYNKPLLGQTGLPQGPSEQKVAVVTVDGCDTGVALRFGSVLGNYSCAAQGTQGGSKKSLDLTGPLLLGGVPDLPESFPVRMRQFVGCMRNLQVDSRHIDMADFIANNGTVPGCPAKKNVCDSNTCHNGGTCVNQWDAFSCECPLGFGGKSCAQEMANPQHFLGSSLVAWHGLSLPISQPWYLSLMFRTRQADGVLLQAITRGRSTITLQLREGHVMLSVEGTGLQASSLRLEPGRANDGDWHHAQLALGASGGPGHAILSFDYGQQRAEGNLGPRLHGLHLSNITVGGIPGPAGGVARGFRGCLQGVRVSDTPEGVNSLDPSHGESINVEQGCSLPDPCDSNPCPANSYCSNDWDSYSCSCDPGYYGDNCTNVCDLNPCEHQSVCTRKPSAPHGYTCECPPNYLGPYCETRIDQPCPRGWWGHPTCGPCNCDVSKGFDPDCNKTSGECHCKENHYRPPGSPTCLLCDCYPTGSLSRVCDPEDGQCPCKPGVIGRQCDRCDNPFAEVTTNGCEVNYDSCPRAIEAGIWWPRTRFGLPAAAPCPKGSFGTAVRHCDEHRGWLPPNLFNCTSITFSELKGFAERLQRNESGLDSGRSQQLALLLRNATQHTAGYFGSDVKVAYQLATRLLAHESTQRGFGLSATQDVHFTENLLRVGSALLDTANKRHWELIQQTEGGTAWLLQHYEAYASALAQNMRHTYLSPFTIVTPNIVISVVRLDKGNFAGAKLPRYEALRGEQPPDLETTVILPESVFRETPPVVRPAGPGEAQEPEELARRQRRHPELSQGEAVASVIIYRTLAGLLPHNYDPDKRSLRVPKRPIINTPVVSISVHDDEELLPRALDKPVTVQFRLLETEERTKPICVFWNHSILVSGTGGWSARGCEVVFRNESHVSCQCNHMTSFAVLMDVSRRENGEILPLKTLTYVALGVTLAALLLTFFFLTLLRILRSNQHGIRRNLTAALGLAQLVFLLGINQADLPFACTVIAILLHFLYLCTFSWALLEALHLYRALTEVRDVNTGPMRFYYMLGWGVPAFITGLAVGLDPEGYGNPDFCWLSIYDTLIWSFAGPVAFAVSMSVFLYILAARASCAAQRQGFEKKGPVSGLQPSFAVLLLLSATWLLALLSVNSDTLLFHYLFATCNCIQGPFIFLSYVVLSKEVRKALKLACSRKPSPDPALTTKSTLTSSYNCPSPYADGRLYQPYGDSAGSLHSTSRSGKSQPSYIPFLLREESALNPGQGPPGLGDPGSLFLEGQDQQHDPDTDSDSDLSLEDDQSGSYASTHSSDSEEEEEEEEEEAAFPGEQGWDSLLGPGAERLPLHSTPKDGGPGPGKAPWPGDFGTTAKESSGNGAPEERLRENGDALSREGSLGPLPGSSAQPHKGILKKKCLPTISEKSSLLRLPLEQCTGSSRGSSASEGSRGGPPPRPPPRQSLQEQLNGVMPIAMSIKAGTVDEDSSGSEFLFFNFLH

SEQ ID NO: 525 - DNA, 5479 bp, Homo sapiens
cggcgaacagacgttctttctcctccatgcagttacacaaaaggagggctacggaaactaaaagtttcggggcctctggctcggtgtgtggagaaaagagaaaacctggagacgggatatgaagatcaatgatgcagactgatggtcttgatgaagctgggcatttataactagattcattaaggaatacaaagaaaatacttaaagggatcaataatggtgtcttctggttgcagaatgcgaagtctgtggtttatcattgtaatcagcttcttaccaaatacagaaggtttcagcagagcagctttaccatttgggctggtgaggcgagaattatcctgtgaaggttattctatagatctgcgatgcccgggcagtgatgtcatcatgattgagagcgctaactatggtcggacggatgacaagatttgtgatgctgacccatttcagatggagaatacagactgctacctccccgatgccttcaaaattatgactcaaaggtgcaacaatcgaacacagtgtatagtagttactgggtcagatgtgtttcctgatccatgtcctggaacatacaaataccttgaagtccaatatgaatgtgtcccttacatttttgtgtgtcctgggaccttgaaagcaattgtggactcaccatgtatatatgaagctgaacaaaaggcgggtgcttggtgcaaggaccctcttcaggctgcagataaaatttatttcatgccctggactccctatcgtaccgatactttaatagaatatgcttctttagaagatttccaaaatagtcgccaaacaacaacatataaacttccaaatcgagtagatggtactggatttgtggtgtatgatggtgctgtcttctttaacaaagaaagaacgaggaatattgtgaaatttgacttgaggactagaattaagagtggcgaggccataattaactatgccaactaccatgatacctcaccatacagatggggaggaaagactgatatcgacctagcagttgatgaaaatggtttatgggtcatttacgccactgaacagaacaatggaatgatagttattagccagctgaatccatacactcttcgatttgaagcaacgtgggagactgtatacgacaaacgtgccgcatcaaatgcttttatgatatgcggagtcctctatgtggttaggtcagtttatcaagacaatgaaagtgaaacaggcaagaactcaattgattacatttataatacccgattaaaccgaggagaatatgtagacgttcccttccccaaccagtatcagtatattgctgcagtggattacaatccaagagataaccaactttacgtgtggaacaataacttcattttacgatattctctggagtttggtccacctgatcctgcccaagtgcctaccacagctgtgacaataacttcttcagctgagctgttcaaaaccataatatcaaccacaagcactacttcacagaaaggccccatgagcacaactgtagctggatcacaggaaggaagcaaagggacaaaaccacctccagcagtttctacaaccaaaattccacctataacaaatatttttcccctgccagagagattctgtgaagcattagactccaaggggataaagtggcctcagacacaaaggggaatgatggttgaacgaccatgccctaagggaacaagaggaactgcctcatatctctgcatgatttccactggaacatggaaccctaagggccccgatcttagcaactgtacctcacactgggtgaatcagctggctcagaagatcagaagcggagaaaatgctgctagtcttgccaatgaactggctaaacataccaaagggccagtgtttgctggggatgtaagttcttcagtgagattgatggagcagttggtggacatccttgatgcacagctgcaggaactgaaacctagtgaaaaagattcagctggacggagttataacaaggcaattgttgacacagtggacaaccttctgagacctgaagctttggaatcatggaaacatatgaattcttctgaacaagcacatactgcaacaatgttactcgatacattggaagaaggagcttttgtcctagctgacaatcttttagaaccaacaagggtctcaatgcccacagaaaatattgtcctggaagttgccgtactcagtacagaaggacagatccaagactttaaatttcctctgggcatcaaaggagcaggcagctcaatccaactgtccgcaaataccgtcaaacagaacagcaggaatgggcttgcaaagttggtgttcatcatttaccggagcctgggacagttccttagtacagaaaatgcaaccattaaactgggtgctgattttattggtcgtaatagcaccattgcagtgaactctcacgtcatttcagtttcaatcaataaagagtccagccgagtatacctgactgatcctgtgctttttaccctgccacacattgatcctgacaattatttcaatgcaaactgctccttctggaactactcagagagaactatgatgggatattggtctacccagggctgcaagctggttgacactaataaaactcgaacaacgtgtgcatgcagccacctaaccaattttgcaattctcatggcccacagggaaattgcatataaagatggcgttcatgaattacttcttacagtcatcacctgggtgggaattgtcatttcccttgtttgcctggctatctgcatcttcaccttctgctttttccgtggcctacagagtgaccgaaatactattcacaagaacctttgtatcaaccttttcattgctgaatttattttcctaataggcattgataagacaaaatatgcgattgcatgcccaatatttgcaggacttctacactttttctttttggcagcttttgcttggatgtgcctagaaggtgtgcagctctacctaatgttagttgaagtttttgaaagtgaatattcaaggaaaaaatattactatgttgctggttacttgtttcctgccacagtggttggagtttcagctgctattgactataagagctatggaacagaaaaagcttgctggcttcatgttgataactactttatatggagcttcattggacctgttaccttcattattctgctaaatattatcttcttggtgatcacattgtgcaaaatggtgaagcattcaaacactttgaaaccagattctagcaggttggaaaacattaagtcttgggtgcttggcgctttcgctcttctgtgtcttcttggcctcacctggtcctttgggttgctttttattaatgaggagactattgtgatggcatatctcttcactatatttaatgctttccagggagtgttcattttcatctttcactgtgctctccaaaagaaagtacgaaaagaatatggcaagtgcttcagacactcatactgctgtggaggcctcccaactgagagtccccacagttcagtgaaggcatcaaccaccagaaccagtgctcgctattcctctggcacacagagtcgtataagaagaatgtggaatgatactgtgagaaaacaatcagaatcttcttttatctcaggtgacatcaatagcacttcaacacttaatcaaggacattcactgaacaatgccagggatacaagtgccatggatactctaccgctaaatggtaattttaacaacagctactcgctgcacaagggtgactataatgacagcgtgcaagttgtggactgtggactaagtctgaatgatactgcttttgagaaaatgatcatttcagaattagtgcacaacaacttacggggcagcagcaagactcacaacctcgagctcacgctaccagtcaaacctgtgattggaggtagcagcagtgaagatgatgctattgtggcagatgcttcatctttaatgcacagcgacaacccagggctggagctccatcacaaagaactcgaggcaccacttattcctcagcggactcactcccttctgtaccaaccccagaagaaagtgaagtccgagggaactgacagctatgtctcccaactgacagcagaggctgaagatcacctacagtcccccaacagagactctctttatacaagcatgcccaatcttagagactctccctatccggagagcagccctgacatggaagaagacctctctccctccaggaggagtgagaatgaggacatttactataaaagcatgccaaatcttggagctggccatcagcttcagatgtgctaccagatcagcaggggcaatagtgatggttatataatccccattaacaaagaagggtgtattccagaaggagatgttagagaaggacaaatgcagctggttacaagtctttaatcatacagctaaggaattccaagggccacatgcgagtattaataaataaagacaccattggcctgacgcagctccctcaaactctgcttgaagagatgactcttgacctgtggttctctggtgtaaaaaagatgactgaaccttgcagttctgtgaatttttataaaacatacaaaaactttgtatatacacagagtatactaaagtgaattatttgttacaaagaaaagagatgccagccaggtattttaagattctgctgctgtttagagaaattgtgaaacaagcaaaacaaaactttccagccattttactgcagcagtctgtgaactaaatttgtaaatatggctgcaccatttttgtaggcctgcattgtattatatacaagacgtaggctttaaaatcctgtgggacaaatttactgtaccttactattcctgacaagacttggaaaagcaggagagatattctgcatcagtttgcagttcactgcaaatcttttacattaaggcaaagattgaaaacatgcttaaccactagcaatcaagccacaggccttatttcatatgtttcctcaactgtacaatgaactattctcatgaaaaatggctaaagaaattatattttgttctattgctagggtaaaataaatacatttgtgtccaactgaaatataattgtcattaaaataattttaaagagtgaagaaaatattgtgaaaagctcttggttgcacatgttatgaaatgttttttcttacactttgtcatggtaagttctactcattttcacttcttttccactgtatacagtgttctgctttgacaaagttagtctttattacttacatttaaatttcttattgccaaaagaacgtgttttatggggagaaacaaactctttgaagccagttatgtcatgccttgcacaaaagtgatgaaatctagaaaagattgtgtgtcacccctgtttattcttgaacagagggcaaagagggcactgggcacttctcacaaactttctagtgaacaaaaggtgcctattctttttt

SEQ ID NO: 526 - protein, 1403 aa, Homo sapiens
MVSSGCRMRSLWFIIVISFLPNTEGFSRAALPFGLVRRELSCEGYSIDLRCPGSDVIMIESANYGRTDDKICDADPFQMENTDCYLPDAFKIMTQRCNNRTQCIVVTGSDVFPDPCPGTYKYLEVQYECVPYIFVCPGTLKAIVDSPCIYEAEQKAGAWCKDPLQAADKIYFMPWTPYRTDTLIEYASLEDFQNSRQTTTYKLPNRVDGTGFVVYDGAVFFNKERTRNIVKFDLRTRIKSGEAIINYANYHDTSPYRWGGKTDIDLAVDENGLWVIYATEQNNGMIVISQLNPYTLRFEATWETVYDKRAASNAFMICGVLYVVRSVYQDNESETGKNSIDYIYNTRLNRGEYVDVPFPNQYQYIAAVDYNPRDNQLYVWNNNFILRYSLEFGPPDPAQVPTTAVTITSSAELFKTIISTTSTTSQKGPMSTTVAGSQEGSKGTKPPPAVSTTKIPPITNIFPLPERFCEALDSKGIKWPQTQRGMMVERPCPKGTRGTASYLCMISTGTWNPKGPDLSNCTSHWVNQLAQKIRSGENAASLANELAKHTKGPVFAGDVSSSVRLMEQLVDILDAQLQELKPSEKDSAGRSYNKAIVDTVDNLLRPEALESWKHMNSSEQAHTATMLLDTLEEGAFVLADNLLEPTRVSMPTENIVLEVAVLSTEGQIQDFKFPLGIKGAGSSIQLSANTVKQNSRNGLAKLVFIIYRSLGQFLSTENATIKLGADFIGRNSTIAVNSHVISVSINKESSRVYLTDPVLFTLPHIDPDNYFNANCSFWNYSERTMMGYWSTQGCKLVDTNKTRTTCACSHLTNFAILMAHREIAYKDGVHELLLTVITWVGIVISLVCLAICIFTFCFFRGLQSDRNTIHKNLCINLFIAEFIFLIGIDKTKYAIACPIFAGLLHFFFLAAFAWMCLEGVQLYLMLVEVFESEYSRKKYYYVAGYLFPATVVGVSAAIDYKSYGTEKACWLHVDNYFIWSFIGPVTFIILLNIIFLVITLCKMVKHSNTLKPDSSRLENIKSWVLGAFALLCLLGLTWSFGLLFINEETIVMAYLFTIFNAFQGVFIFIFHCALQKKVRKEYGKCFRHSYCCGGLPTESPHSSVKASTTRTSARYSSGTQSRIRRMWNDTVRKQSESSFISGDINSTSTLNQGHSLNNARDTSAMDTLPLNGNFNNSYSLHKGDYNDSVQVVDCGLSLNDTAFEKMIISELVHNNLRGSSKTHNLELTLPVKPVIGGSSSEDDAIVADASSLMHSDNPGLELHHKELEAPLIPQRTHSLLYQPQKKVKSEGTDSYVSQLTAEAEDHLQSPNRDSLYTSMPNLRDSPYPESSPDMEEDLSPSRRSENEDIYYKSMPNLGAGHQLQMCYQISRGNSDGYIIPINKEGCIPEGDVREGQMQLVTSL

SEQ ID NO: 527 - DNA, 5211 bp, Homo sapiens
ccgcggctgggagacagcgagccagagtctgggtgtttgtgcgagagccacggcgggggctggggcgagtggccggcatggctgaaggctgcgctctgcaaccttgaagagccgctgcattgagaggccagggacagggagaccggtgcgatggcagagcgcggcccccgccgctgcgccgggccggcccggctggcctgagccgccggaggagcggggctgcctctgcgcgtccatggagcagcgggaagggcgaaactccggagcgccgcgtccctgcgccgctgcggcggactgctgaaggggccgagcccgcgcggaccgccgaggaagagacccccgctccagcccgcaggccggctgcccgggggcggcgggggacatcggagggcagcggagcgagcagcgccgcgggagaggccggcgcgggaggcggccgcagcaatgccgggcccgctagggctgctctgcttcctcgccctggggctgctcggctcggccgggcccagcggcgcggcgccgcctctctgcgcggcgccctgcagctgcgacggcgaccgtcgggtggactgctccgggaaggggctgacggccgtgcccgaggggctcagcgccttcacccaagcgctggatatcagtatgaacaacattactcagttgccagaagatgcatttaagaactttccttttctagaagagctacaattggcgggcaacgacctttcttttatccacccaaaggccttgtctgggttgaaagaactcaaagttctaacgctccagaataatcagttgaaaacagtacccagtgaagccattcgagggctgagtgctttgcagtctttgcgtttagatgccaaccatattacctcagtccccgaggacagttttgaaggacttgttcagttacggcatctgtggctggatgacaacagcttgacggaggtgcctgtgcaccccctcagcaatctgcccaccctacaggcgctgaccctggctctcaacaagatctcaagcatccctgactttgcatttaccaacctttcaagcctggtagttctgcatcttcataacaataaaattagaggcctgagtcaacactgttttgatggactagataacctggagaccttagacttgagttataataacttgggggaatttcctcaggctattaaagcccgtcctagccttaaagagctaggatttcatagtaattctatttctgttatccctgatggagcatttgatggtaatccactcttaagaactatacatttgtatgataatcctctgtcttttgtggggaactcagcatctcacaatttatctgatcttcattccctagtcattcgtggtgcaagcatggtgcagcagttccccaatcttacaggaactgtccacctggaaagtctgactttgacaggtacaaagataagcagcatacctaataatttgtgtcaagaacaaaagatgcttaggactttggacttgtcttacaataatataagagaccttccaagttttaatggttgccatgctctggaagaaatttctttacagcgtaatcaaatctaccaaataaaggaaggcacctttcaaggcctgatatctctaaggattctagatctgagtagaaacctgatacatgaaattcacagtagagcttttgccacacttgggccaataactaacctagatgtaagtttcaatgaattaacttcctttcctacggaaggcccgaatgggctaaatcaactgaaacttgtgggcaacttcaagctgaaagaagccttagcagcaaaagactttgttaacctcaggtctttatcggtaccatatgcttatcagtgctgtgcattttggggttgtgactcttatgcaaatttaaacacagaagataacagcctccaggaccacagtgtggcacaggagaaaggtactgctgatgcagcaaatgtcacaagcactcttgaaaatgaagaacatagtcaaataattatccattgtacaccttcaacaggtgcttttaagccctgtgaatatttactgggaagctggatgattcgtcttactgtgtggttcattttcttggttgcattatttttcaacctgcttgttattttaacaacatttgcatcttgtacatcactgccttcgtccaaattgtttataggcttgatttctgtgtctaacttattcatgggaatctatactggcatcctaacttttcttgatgctgtgtcctggggcagattcgctgaatttggcatttggtgggaaactggcagtggctgcaaagtagctgggtttcttgcagttttctcctcagaaagtgccatatttttattaatgctagcaactgtcgaaagaagcttatctgcaaaagatataatgaaaaatgggaagagcaatcatctcaaacagttccgggttgctgccctttcggctttcctaggtgctacagtagcaggctgttttccccttttccatagaggggaatattctgcatcacccctttgtttgccatttcctacaggtgaaacgccatcattaggattcactgtaacgttagtgctattaaactcactagcatttttattaatggccgttatctacactaagctatactgcaacttggaaaaagaggacctctcagaaaactcacaatctagcatgattaagcatgtcgcttggctaatcttcaccaattgcatctttttctgccctgtggcgtttttttcatttgcaccattgatcactgcaatctctatcagccccgaaataatgaagtctgttactctgatattttttccattgcctgcttgcctgaatccagtcctgtatgttttcttcaacccaaagtttaaagaagactggaagttactgaagcgacgtgttaccaagaaaagtggatcagtttcagtttccatcagtagccaaggtggttgtctggaacaggatttctactacgactgtggcatgtactcacatttgcagggcaacctgactgtttgcgactgctgcgaatcgtttcttttaacaaagccagtatcatgcaaacacttgataaaatcacacagctgtcctgcattggcagtggcttcttgccaaagacctgagggctactggtccgactgtggcacacagtcggcccactctgattatgcagatgaagaagattcctttgtctcagacagttctgaccaggtgcaggcctgtggacgagcctgcttctaccagagtagaggattccctttggtgcgctatgcttacaatctaccaagagttaaagactgaactactgtgtgtgtaaccgtttcccccgtcaaccaaaatcagtgtttatagagtgaaccctattctcatctttcatctgggaagcacttctgtaatcactgcctggtgtcacttagaagaaggagaggtggcagtttatttctcaaaccagtcattttcaaagaacaggtgcctaaattataaattggtgaaaaatgcaatgtccaagcaatgtatgatctgtttgaaacaaatatatgacttgaaaaggatcttaggtgtagtagagcaatataatgttagttttttctgatccataagaagcaaatttatacctatttgtgtattaagcacaagataaagaacagctgttaatattttttaaaaatctattttaaaatgtgattttctataactgaagaaaatatcttgctaattttacctaatgtttcatccttaatctcaggacaacttactgcagggccaaaaaagggactgtcccagctagaactgtgagagtatacataggcattactttattatgttttcacttgccatccttgacataagagaactataaattttgtttaagcaatttataaatctaaaacctgaagatgtttttaaaacaatattaacagctgttaggttaaaaaaatagctggacatttgttttcagtcattatacattgctttggtccaatcagtaattttttcttaagtgttttgtgattacactactagaaaaaaagtaaaaggctaattgctgtgtgggtttagtcgatttggctaaactactaactaatgtgggggtttaatagtatctgagggatttggtggcttcatgtaatgttctcattaatgaatacttcctaatatcgttggctctactaatattttccaatttgctgggatgtcacctagcaatagcttggattatatagaaagtaaactgtggtcaatacttgcatttaattagacgaaacggggagtaattatgacacgaagtacttatgtttatttcttagtgagctggattatcttgaacctgtgctattaaatggaaatttccatacatcttccccatactattttttataaaagagcctattcaatagctcagaggttgaactctggttaaacaagataatatgttattaataaaaatagaagaagaaagaataaagcttagtcctgtgtctttaaaaattaaaaattttacttgattcccatctatgggctttagacctattactgggtggagtcttaaagttataattgttcaatatgttttttgaacagtgtgctaaatcaatagcaaacccactgccatattagttattctgaatatactaaaaaaatccagctagattgcagtttaataattaaactgtacatactgtgcatataatgaatttttatcttatgtaaattatttttagaacacaagttgggaaatgtggcttctgttcatttcgtttaattaaagctacctcctaaactatagtggctgccagtagcagactgttaaattgtggtttatatactttttgcattgtaaatagtctttgttgtacattgtcagtgtaataaaaacagaatctttgtatatcaaaatcatgtagtttgtataaaatgtgggaaggatttatttacagtgtgttgtaattttgtaaggccaactatttacaagttttaaaaattgctatcatgtatatttacacatctgataaatattaaatcataacttggtaagaaactcctaattaaaaggttttttccaaaattcaggttattgaaaatttttcattttattcatttaaaaactagaataacagatatataaaagtgttaatctttgtgctatatggtatgaaatacaatattgtactcagtgttttgaattattaaagtttctagaaagcaaaaaaa

SEQ ID NO: 528 - protein, 951 aa, Homo sapiens
MPGPLGLLCFLALGLLGSAGPSGAAPPLCAAPCSCDGDRRVDCSGKGLTAVPEGLSAFTQALDISMNNITQLPEDAFKNFPFLEELQLAGNDLSFIHPKALSGLKELKVLTLQNNQLKTVPSEAIRGLSALQSLRLDANHITSVPEDSFEGLVQLRHLWLDDNSLTEVPVHPLSNLPTLQALTLALNKISSIPDFAFTNLSSLVVLHLHNNKIRGLSQHCFDGLDNLETLDLSYNNLGEFPQAIKARPSLKELGFHSNSISVIPDGAFDGNPLLRTIHLYDNPLSFVGNSASHNLSDLHSLVIRGASMVQQFPNLTGTVHLESLTLTGTKISSIPNNLCQEQKMLRTLDLSYNNIRDLPSFNGCHALEEISLQRNQIYQIKEGTFQGLISLRILDLSRNLIHEIHSRAFATLGPITNLDVSFNELTSFPTEGPNGLNQLKLVGNFKLKEALAAKDFVNLRSLSVPYAYQCCAFWGCDSYANLNTEDNSLQDHSVAQEKGTADAANVTSTLENEEHSQIIIHCTPSTGAFKPCEYLLGSWMIRLTVWFIFLVALFFNLLVILTTFASCTSLPSSKLFIGLISVSNLFMGIYTGILTFLDAVSWGRFAEFGIWWETGSGCKVAGFLAVFSSESAIFLLMLATVERSLSAKDIMKNGKSNHLKQFRVAALSAFLGATVAGCFPLFHRGEYSASPLCLPFPTGETPSLGFTVTLVLLNSLAFLLMAVIYTKLYCNLEKEDLSENSQSSMIKHVAWLIFTNCIFFCPVAFFSFAPLITAISISPEIMKSVTLIFFPLPACLNPVLYVFFNPKFKEDWKLLKRRVTKKSGSVSVSISSQGGCLEQDFYYDCGMYSHLQGNLTVCDCCESFLLTKPVSCKHLIKSHSCPALAVASCQRPEGYWSDCGTQSAHSDYADEEDSFVSDSSDQVQACGRACFYQSRGFPLVRYAYNLPRVKD

SEQ ID NO: 529 - DNA, 2137 bp, Homo sapiens
aactggaagggcagccgtctgccgcccacgaacaccttctcaagcactttgagtgaccacggcttgcaagctggtggctggccccccgagtcccgggctctgaggcacggccgtcgacttaagcgttgcatcctgttacctggagaccctctgagctctcacctgctacttctgccgctgcttctgcacagagcccgggcgaggacccctccaggatgcaggtcccgaacagcaccggcccggacaacgcgacgctgcagatgctgcggaacccggcgatcgcggtggccctgcccgtggtgtactcgctggtggcggcggtcagcatcccgggcaacctcttctctctgtgggtgctgtgccggcgcatggggcccagatccccgtcggtcatcttcatgatcaacctgagcgtcacggacctgatgctggccagcgtgttgcctttccaaatctactaccattgcaaccgccaccactgggtattcggggtgctgctttgcaacgtggtgaccgtggccttttacgcaaacatgtattccagcatcctcaccatgacctgtatcagcgtggagcgcttcctgggggtcctgtacccgctcagctccaagcgctggcgccgccgtcgttacgcggtggccgcgtgtgcagggacctggctgctgctcctgaccgccctgtccccgctggcgcgcaccgatctcacctacccggtgcacgccctgggcatcatcacctgcttcgacgtcctcaagtggacgatgctccccagcgtggccatgtgggccgtgttcctcttcaccatcttcatcctgctgttcctcatcccgttcgtgatcaccgtggcttgttacacggccaccatcctcaagctgttgcgcacggaggaggcgcacggccgggagcagcggaggcgcgcggtgggcctggccgcggtggtcttgctggcctttgtcacctgcttcgcccccaacaacttcgtgctcctggcgcacatcgtgagccgcctgttctacggcaagagctactaccacgtgtacaagctcacgctgtgtctcagctgcctcaacaactgtctggacccgtttgtttattactttgcgtcccgggaattccagctgcgcctgcgggaatatttgggctgccgccgggtgcccagagacaccctggacacgcgccgcgagagcctcttctccgccaggaccacgtccgtgcgctccgaggccggtgcgcaccctgaagggatggagggagccaccaggcccggcctccagaggcaggagagtgtgttctgagtcccgggggcgcagcttggagagccgggggcgcagcttggaggatccaggggcgcatggagaggccacggtgccagaggttcagggagaacagctgcgttgctcccaggcactgcagaggcccggtggggaagggtctccaggctttattcctcccaggcactgcagaggcaccggtgaggaagggtctccaggcttcactcagggtagagaaacaagcaaagcccagcagcgcacagggtgcttgttatcctgcagagggtgcctctgcctctctgtgtcaggggacagcttgtgtcaccacgcccggctaatttttgtattttttttagtagagctgggctgtcacccccgagctccttagacactcctcacacctgtccatacccgaggatggatattcaaccagccccaccgcctacccgactcggtttctggatatcctctgtgggcgaactgcgagccccattcccagctcttctccctgctgacatcgtcccttagcacacctgtccatacccgaggatggatattcaaccagccccaccgcctacccgactcggtttctggatatcctctgtgggcgaactgcgagccccattcccagctcttctccctgctgacatcgtcccttagttgtggttctggccttctccattctcctccaggggttctggtctccgtagcccggtgcacgccgaaatttctgtttatttcactcaggggcactgtggttgctgtggttggaattcttctttcagaggagcgcctggggctcctgcaagtcagctactctccgtgcccacttcccctcacacacacacccccctcgtgccgaattc

SEQ ID NO: 530 - protein, 359 aa, Homo sapiens
MQVPNSTGPDNATLQMLRNPAIAVALPVVYSLVAAVSIPGNLFSLWVLCRRMGPRSPSVIFMINLSVTDLMLASVLPFQIYYHCNRHHWVFGVLLCNVVTVAFYANMYSSILTMTCISVERFLGVLYPLSSKRWRRRRYAVAACAGTWLLLLTALSPLARTDLTYPVHALGIITCFDVLKWTMLPSVAMWAVFLFTIFILLFLIPFVITVACYTATILKLLRTEEAHGREQRRRAVGLAAVVLLAFVTCFAPNNFVLLAHIVSRLFYGKSYYHVYKLTLCLSCLNNCLDPFVYYFASREFQLRLREYLGCRRVPRDTLDTRRESLFSARTTSVRSEAGAHPEGMEGATRPGLQRQESVF

SEQ ID NO: 531 - DNA, 1272 bp, Homo sapiens
gaattcggccaaagaggcctatgcttctctgaagacttgcagcaaggcttgctgaggctcacagaagatagccccagtgttttggagtggttttgaatgtgattctgagatcagactgactgagctggaatcctggctttatatcttaccagctacacaaccttggagtcttagaaattttttcttttcaataagcagtcatccttactttccctcaagatgacaaacagttcgttcttctgcccagtttataaagatctggagccattcacgtattttttttatttagttttccttgttggaattattggaagttgttttgcaacctgggcttttatacagaagaatacgaatcacaggtgtgtgagcatctacttaattaatttgcttacagccgatttcctgcttactctggcattaccagtgaaaattgttgttgacttgggtgtggcaccttggaagctgaagatattccactgccaagtaacagcctgcctcatctatatcaatatgtatttatcaattatcttcttagcatttgtcagcattgaccgctgtcttcagctgacacacagctgcaagatctaccgaatacaagaacccggatttgccaaaatgatatcaaccgttgtgtggctaatggtccttcttataatggtgccaaatatgatgattcccatcaaagacatcaaggaaaagtcaaatgtgggttgtatggagtttaaaaaggaatttggaagaaattggcatttgctgacaaatttcatatgtgtagcaatatttttaaatttctcagccatcattttaatatccaattgccttgtaattcgacagctctacagaaacaaagataatgaaaattacccaaatgtgaaaaaggctctcatcaacatacttttagtgaccacgggctacatcatatgctttgttccttaccacattgtccgaatcccgtataccctcagccagacagaagtcataactgattgctcaaccaggatttcactcttcaaagccaaagaggctacactgctcctggctgtgtcgaacctgtgctttgatcctatcctgtactatcacctctcaaaagcattccgctcaaaggtcactgagacttttgcctcacctaaagagaccaaggctcagaaagaaaaattaagatgtgaaaataatgcataaaagacaggattttttgtgctaccaattctggccttactggaccataaagttaattatagctttgaaagataaaaaaaaaaaaaaagcggccgc

SEQ ID NO: 532 - protein, 319 aa, Homo sapiens
MTNSSFFCPVYKDLEPFTYFFYLVFLVGIIGSCFATWAFIQKNTNHRCVSIYLINLLTADFLLTLALPVKIVVDLGVAPWKLKIFHCQVTACLIYINMYLSIIFLAFVSIDRCLQLTHSCKIYRIQEPGFAKMISTVVWLMVLLIMVPNMMIPIKDIKEKSNVGCMEFKKEFGRNWHLLTNFICVAIFLNFSAIILISNCLVIRQLYRNKDNENYPNVKKALINILLVTTGYIICFVPYHIVRIPYTLSQTEVITDCSTRISLFKAKEATLLLAVSNLCFDPILYYHLSKAFRSKVTETFASPKETKAQKEKLRCENNA

SEQ ID NO: 533 - DNA, 2516 bp, Homo sapiens
gagggaggagggcgggcgagctggagccggcaggcagcgggagcccgagagagccgcgtcgggagtgcggtctccatggcagtgctgggcgcagccggagagagcctgtccagggggctgagccccacccccaaatccctggggcatccagaagattcctgactggtcaagaaccagaggcaaaagagacctggaagtcccagcatggggaccagaaccccccagccagcctcatagttgggaaagtagccagcttgcctgccccatcaattgcagggatgcttaaggaaggccccgcccagtatgaaagctgaggattgcctctgctgaccctcagtctcctcccctgccctctacatctgccctcagctgggtccatcatgcaatgctgagcactggggtgagcctgggggcagcctgcctgctgacagggcgaggattgtggggatcatgggagtgtttgtgagtggggctcctgggtgagacctagcccccacccccacagagctcaagggggtggggggctgaggataggatggctcggggcggggcgggggcagaggaggcctccctgcgctccaacgcattgtcctggctggcctgtgggctcctggcgctgctggccaatgcctggatcatcctcagcatctcggccaagcagcagaagcacaagccactggagctgctgctctgcttcctagcgggcacacacatactcatggcagctgtgcccctcaccacctttgccgtggtgcagctgcgtcgtcaggcttcctccgactatgactggaacgagagtatctgcaaggtcttcgtgtccacctactacaccctggcgctggccacctgcttcacggtcgcctccctctcctaccatcgcatgtggatggtgcgctggcccgtcaactaccgcctcagcaacgccaagaagcaggcactgcatgccgtcatgggcatctggatggtcagcttcatcctctccacactgccctccattggctggcacaacaacggcgagcgctactatgcccgcggctgccagttcatagtctccaagatcggcctcggctttggcgtttgcttcagcctcttgctacttgggggaattgtcatgggtctggtctgtgtggccatcaccttctaccagacactgtgggcccggccccggagggctcggcaggcccggagagtggggggtggtggggggaccaaagcgggtgggccaggggccttgggtacccggccagcttttgaggtaccagccattgtggtggaggatgcccgagggaagcggcggtcctcgctggatggctcggagtctgccaagacatccctgcaggtcaccaacttggtcagcgccatcgtctttctctatgactcactcacaggggtgcccatcttggtggtgagcttcttctccctcaagtcggactcggcgcccccctggatggtgctggctgtgctgtggtgctccatggcacagacgctgctgctgccctccttcatctggtcctgcgagcgctaccgcgccgacgtgcgcacagtgtgggagcaatgcgtggccatcatgtctgaggaggatggagatgacgatgggggctgtgacgactatgcagagggccgagtttgcaaagttcgctttgatgctaacggagccacaggaccagggagccgggaccccgcccaggtgaagctgctgcctggaaggcacatgctcttccctcctcttgagagagtccactacttacaggtccccctatcccggcgtctgtcccatgatgagacaaacatcttctctacccctcgggaaccaggctccttcctgcacaagtggtcatcctctgatgacatccgggtcctcccagcccagagccgggccctcgggggtcctcctgagtacctgggacaaagacacaggttggaggacgaggaggacgaggaagaggctgaaggtggggggctggccagccttcgccaattcttggagagtggggttctggggtcaggtgggggacccccacggggtcctggcttcttccgggaggagatcaccaccttcatcgatgagacacctctgccttctccgactgcctcaccagggcactctcctcgtcggccccggccactgggcctctcaccccgccgactctcccttgggtcccctgagagcagagccgttggacttcctttgggactaagcgcagggagacgctgctccctgacggggggtgaagaaagtgcaagggcttggggaggatcctggggcccaggcaaccccatctttccccagctgaccctgtgagcccaagcaggcctgctgaactcagaggagaaagcctgagtgagtaacacctcattctggccgagagtagggcagctgcctccagactctggggagacgggcgctagatttggggctcagaaggccctgctctctcccatccaagtgaccagatgccctactcagcttccatcacccctagcaatatgtattaaagtctgaagtgttgccatgg

SEQ ID NO: 534 - protein, 588 aa, Homo sapiens
MARGGAGAEEASLRSNALSWLACGLLALLANAWIILSISAKQQKHKPLELLLCFLAGTHILMAAVPLTTFAVVQLRRQASSDYDWNESICKVFVSTYYTLALATCFTVASLSYHRMWMVRWPVNYRLSNAKKQALHAVMGIWMVSFILSTLPSIGWHNNGERYYARGCQFIVSKIGLGFGVCFSLLLLGGIVMGLVCVAITFYQTLWARPRRARQARRVGGGGGTKAGGPGALGTRPAFEVPAIVVEDARGKRRSSLDGSESAKTSLQVTNLVSAIVFLYDSLTGVPILVVSFFSLKSDSAPPWMVLAVLWCSMAQTLLLPSFIWSCERYRADVRTVWEQCVAIMSEEDGDDDGGCDDYAEGRVCKVRFDANGATGPGSRDPAQVKLLPGRHMLFPPLERVHYLQVPLSRRLSHDETNIFSTPREPGSFLHKWSSSDDIRVLPAQSRALGGPPEYLGQRHRLEDEEDEEEAEGGGLASLRQFLESGVLGSGGGPPRGPGFFREEITTFIDETPLPSPTASPGHSPRRPRPLGLSPRRLSLGSPESRAVGLPLGLSAGRRCSLTGGEESARAWGGSWGPGNPIFPQLTL

SEQ ID NO: 535 - DNA, 1157 bp, Homo sapiens
tcccaggtgcccgtctgatggggagatggctgatgcccagaacatttcactggacagcccagggagtgtgggggccgtggcagtgcctgtggtctttgccctaatcttcctgctgggcacagtgggcaatgggctggtgctggcagtgctcctgcagcctggcccgagtgcctggcaggagcctggcagcaccacggacctgttcatcctcaacctggcggtggctgacctctgcttcatcctgtgctgcgtgcccttccaggccaccatctacacgctggatgcctggctctttggggccctcgtctgcaaggccgtgcacctgctcatctacctcaccatgtacgccagcagctttacgctggctgctgtctccgtggacaggtacctggccgtgcggcacccgctgcgctcgcgcgccctgcgcacgccgcgtaacgcccgcgccgcagtggggctggtgtggctgctggcggcgctcttctcggcgccctacctcagctactacggcaccgtgcgctacggcgcgctggagctctgcgtgcccgcctgggaggacgcgcgccgccgcgccctggacgtggccaccttcgctgccggctacctgctgcccgtggctgtggtgagcctggcctacgggcgcacgctgcgcttcctgtgggccgccgtgggtcccgcgggcgcggcggcggccgaggcgcggcggagggcgacgggccgcgcggggcgcgccatgctggcggtggccgcgctctacgcgctctgctggggtccgcaccacgcgctcatcctgtgcttctggtacggccgcttcgccttcagcccggccacctacgcctgccgcctggcctcacactgcctggcctacgccaactcctgcctcaacccgctcgtctacgcgctcgcctcgcgccacttccgcgcgcgcttccgccgcctgtggccgtgcggccgccgacgccgccaccgtgcccgccgcgccttgcgtcgcgtccgccccgcgtcctcgggcccacccggctgccccggagacgcccggcctagcgggaggctgctggctggtggcggccagggcccggagcccagggagggacccgtccacggcggagaggctgcccgaggaccggaataaaccctgccgcctggactccgcctgt

SEQ ID NO: 536 - protein, 368 aa, Homo sapiens
MADAQNISLDSPGSVGAVAVPVVFALIFLLGTVGNGLVLAVLLQPGPSAWQEPGSTTDLFILNLAVADLCFILCCVPFQATIYTLDAWLFGALVCKAVHLLIYLTMYASSFTLAAVSVDRYLAVRHPLRSRALRTPRNARAAVGLVWLLAALFSAPYLSYYGTVRYGALELCVPAWEDARRRALDVATFAAGYLLPVAVVSLAYGRTLRFLWAAVGPAGAAAAEARRRATGRAGRAMLAVAALYALCWGPHHALILCFWYGRFAFSPATYACRLASHCLAYANSCLNPLVYALASRHFRARFRRLWPCGRRRRHRARRALRRVRPASSGPPGCPGDARPSGRLLAGGGQGPEPREGPVHGGEAARGPE

SEQ ID NO: 537 - DNA, 1170 bp, Homo sapiens
atggcgctgacccccgagtccccgagcagcttccctgggctggccgccaccggcagctctgtgccggagccgcctggcggccccaacgcaaccctcaacagctcctgggccagcccgaccgagcccagctccctggaggacctggtggccacgggcaccattgggactctgctgtcggccatgggcgtggtgggcgtggtgggcaacgcctacacgctggtggtcacctgccgctccctgcgtgcggtggcctccatgtacgtctacgtggtcaacctggcgctggccgacctgctgtacctgctcagcatccccttcatcgtggccacctacgtcaccaaggagtggcacttcggggacgtgggctgccgcgtgctcttcggcctggacttcctgaccatgcacgccagcatcttcacgctgaccgtcatgagcagcgagcgctacgctgcggtgctgcggccgctggacaccgtgcagcgccccaagggctaccgcaagctgctggcgctgggcacctggctgctggcgctgctgctgacgctgcccgtgatgctggccatgcggctggtgcgccggggtcccaagagcctgtgcctgcccgcctggggcccgcgcgcccaccgcgcctacctgacgctgctcttcgccaccagcatcgcggggcccgggctgctcatcgggctgctctacgcgcgcctggcccgcgcctaccgccgctcgcagcgcgcctccttcaagcgggcccggcggccgggggcgcgcgcgctgcgcctggtgctgggcatcgtgctgctcttctgggcctgcttcctgcccttctggctgtggcagctgctcgcccagtaccaccaggccccgctggcgccgcggacggcgcgcatcgtcaactacctgaccacctgcctcacctacggcaacagctgcgccaaccccttcctctacacgctgctcaccaggaactaccgcgaccacctgcgcggccgcgtgcggggcccgggcagcgggggaggccgggggcccgttccctccctgcagccccgcgcccgcttccagcgctgttcgggccgctccctgtcttcctgcagcccacagcccactgacagcctcgtgctggccccagcggccccggcccgacctgcgcccgagggtcccagggccccggcgtga

SEQ ID NO: 538 - protein, 389 aa, Homo sapiens
MALTPESPSSFPGLAATGSSVPEPPGGPNATLNSSWASPTEPSSLEDLVATGTIGTLLSAMGVVGVVGNAYTLVVTCRSLRAVASMYVYVVNLALADLLYLLSIPFIVATYVTKEWHFGDVGCRVLFGLDFLTMHASIFTLTVMSSERYAAVLRPLDTVQRPKGYRKLLALGTWLLALLLTLPVMLAMRLVRRGPKSLCLPAWGPRAHRAYLTLLFATSIAGPGLLIGLLYARLARAYRRSQRASFKRARRPGARALRLVLGIVLLFWACFLPFWLWQLLAQYHQAPLAPRTARIVNYLTTCLTYGNSCANPFLYTLLTRNYRDHLRGRVRGPGSGGGRGPVPSLQPRARFQRCSGRSLSSCSPQPTDSLVLAPAAPARPAPEGPRAPA

SEQ ID NO: 539 - DNA, 1212 bp, Homo sapiens
atggcttgcaatggcagtgcggccagggggcactttgaccctgaggacttgaacctgactgacgaggcactgagactcaagtacctggggccccagcagacagagctgttcatgcccatctgtgccacatacctgctgatcttcgtggtgggcgctgtgggcaatgggctgacctgtctggtcatcctgcgccacaaggccatgcgcacgcctaccaactactacctcttcagcctggccgtgtcggacctgctggtgctgctggtgggcctgcccctggagctctatgagatgtggcacaactaccccttcctgctgggcgttggtggctgctatttccgcacgctactgtttgagatggtctgcctggcctcagtgctcaacgtcactgccctgagcgtggaacgctatgtggccgtggtgcacccactccaggccaggtccatggtgacgcgggcccatgtgcgccgagtgcttggggccgtctggggtcttgccatgctctgctccctgcccaacaccagcctgcacggcatccggcagctgcacgtgccctgccggggcccagtgccagactcagctgtttgcatgctggtccgcccacgggccctctacaacatggtagtgcagaccaccgcgctgctcttcttctgcctgcccatggccatcatgagcgtgctctacctgctcattgggctgcgactgcggcgggagaggctgctgctcatgcaggaggccaagggcaggggctctgcagcagccaggtccagatacacctgcaggctccagcagcacgatcggggccggagacaagtgaccaagatgctgtttgtcctggtcgtggtgtttggcatctgctgggccccgttccacgccgaccgcgtcatgtggagcgtcgtgtcacagtggacagatggcctgcacctggccttccagcacgtgcacgtcatctccggcatcttcttctacctgggctcggcggccaaccccgtgctctatagcctcatgtccagccgcttccgagagaccttccaggaggccctgtgcctcggggcctgctgccatcgcctcagaccccgccacagctcccacagcctcagcaggatgaccacaggcagcaccctgtgtgatgtgggctccctgggcagctgggtccaccccctggctgggaacgatggcccagaggcgcagcaagagaccgatccatcctga

SEQ ID NO: 540 - protein, 403 aa, Homo sapiens
MACNGSAARGHFDPEDLNLTDEALRLKYLGPQQTELFMPICATYLLIFVVGAVGNGLTCLVILRHKAMRTPTNYYLFSLAVSDLLVLLVGLPLELYEMWHNYPFLLGVGGCYFRTLLFEMVCLASVLNVTALSVERYVAVVHPLQARSMVTRAHVRRVLGAVWGLAMLCSLPNTSLHGIRQLHVPCRGPVPDSAVCMLVRPRALYNMVVQTTALLFFCLPMAIMSVLYLLIGLRLRRERLLLMQEAKGRGSAAARSRYTCRLQQHDRGRRQVTKMLFVLVVVFGICWAPFHADRVMWSVVSQWTDGLHLAFQHVHVISGIFFYLGSAANPVLYSLMSSRFRETFQEALCLGACCHRLRPRHSSHSLSRMTTGSTLCDVGSLGSWVHPLAGNDGPEAQQETDPS

SEQ ID NO: 541 - DNA, 1020 bp, Homo sapiens
atggctaaccttgacaaatacactgaaacattcaagatgggtagcaacagtaccagcactgctgagatttactgtaatgtcactaatgtgaaatttcaatactccctctatgcaaccacctatatcctcatattcattcctggtcttctggctaacagtgcagccttgtgggttctgtgccgcttcatcagcaagaaaaataaagccatcattttcatgatcaacctctctgtggctgaccttgctcatgtattatctttacccctccggatttactattacatcagccaccactggcctttccagagagccctttgcctgctctgcttctacctgaagtatctcaacatgtatgccagcatttgtttcctgacgtgcatcagtcttcaaaggtgcttttttctcctcaagcccttcagggccagagactggaagcgtaggtacgatgtgggcatcagtgctgccatctggatcgttgtggggactgcctgtttgccatttcccatcctgagaagcacagacttaaacaacaacaagtcctgctttgctgatcttggatacaagcaaatgaatgcagttgcgttggtcgggatgattacagttgctgagcttgcaggatttgtgatcccagtgatcatcatcgcatggtgtacctggaaaactactatatccttgagacagccaccaatggctttccaagggatcagtgagaggcagaaagcactgcggatggtgttcatgtgtgctgcagtcttcttcatctgcttcactccctatcatattaactttattttttacaccatggtaaaggaaaccatcattagcagttgtcccgttgtccgaatcgcactgtatttccaccctttttgcctgtgccttgcaagtctctgctgccttttggatccaattctttattactttatggcttcagagtttcgtgaccaactatcccgccatggcagttctgtgacccgctcccgcctcatgagcaaggagagtggttcatcaatgattggctaa

SEQ ID NO: 542 - protein, 339 aa, Homo sapiens
MANLDKYTETFKMGSNSTSTAEIYCNVTNVKFQYSLYATTYILIFIPGLLANSAALWVLCRFISKKNKAIIFMINLSVADLAHVLSLPLRIYYYISHHWPFQRALCLLCFYLKYLNMYASICFLTCISLQRCFFLLKPFRARDWKRRYDVGISAAIWIVVGTACLPFPILRSTDLNNNKSCFADLGYKQMNAVALVGMITVAELAGFVIPVIIIAWCTWKTTISLRQPPMAFQGISERQKALRMVFMCAAVFFICFTPYHINFIFYTMVKETIISSCPVVRIALYFHPFCLCLASLCCLLDPILYYFMASEFRDQLSRHGSSVTRSRLMSKESGSSMIG

SEQ ID NO: 543 - protein, 383 aa, Equine herpesvirus 2
MATTSATSTVNTSSLATTMTTNFTSLLTSVVTTIASLVPSTNSSEDYYDDLDDVDYEESAPCYKSDTTRLAAQVVPALYLLVFLFGLLGNILVVIIVIRYMKIKNLTNMLLLNLAISDLLFLLTLPFWMHYIGMYHDWTFGISLCKLLRGVCYMSLYSQVFCIILLTVDRYLAVVYAVTALRFRTVTCGIVTCVCTWFLAGLLSLPEFFFHGHQDDNGRVQCDPYYPEMSTNVWRRAHVAKVIMLSLILPLLIMAVCYYVIIRRLLRRPSKKKYKAIRLIFVIMVAYFVFWTPYNIVLLLSTFHATLLNLQCALSSNLDMALLITKTVAYTHCCINPVIYAFVGEKFRRHLYHFFHTYVAIYLCKYIPFLSGDGEGKEGPTRI

SEQ ID NO: 544 - DNA, 4839 bp, Homo sapiens
gcgagaaccccgactgaccgcggccacggcggctccccgacctgccgcgtcctgcgggcggcgctgggctccgggcactcgggctgcgcccccatggcctcgcccgcggggaacctgagcgcgtggccgggctgggggtggccgccgccggccgcgctgaggaacctgacctcctccccggccccgaccgcgtccccgtccccggccccgtcgtggacgccctcgccgcgccccggccccgcgcacccgttcctgcagccgccctgggccgtggcgctctggtcgctggcctacggcgccgtggtggccgtggcggtgctcggcaacctcgtggtgatctggatcgtgctggcccacaagcgcatgcggacggtcaccaactccttcctcgtgaacctggccttcgccgacgccgccatggccgcgctcaacgcgctggtcaacttcatctacgcgctgcacggagagtggtacttcggcgccaactactgccgcttccagaacttcttccccatcaccgccgtgttcgccagcatctactccatgacggccatcgcggtggacagatacatggccattattgaccccctgaagcccaggctgtctgccacggccacccggatcgtcattggaagcatctggattctggcatttctacttgcatttcctcagtgtctgtattccaaaatcaaagtcatgccaggccgtactctttgctacgtgcagtggccagaaggttcaaggcaacatttcacgtaccacatgatcgtcatcgtcctggtgtactgctttcctttgctcatcatgggcatcacctacaccatagttggaatcacgctctggggaggggagatcccaggagacacctgcgacaagtaccaggagcagctgaaggccaagcggaaggttgtaaaaatgatgatcatcgttgtggtgacctttgccatctgctggctgccctatcacatctacttcatcctcaccgccatctatcagcagctgaacaggtggaaatacatccagcaggtctacctggccagcttctggctggccatgagctcgaccatgtacaaccccatcatctactgctgtctgaataagagatttcgtgctggcttcaagagggccttccgctggtgccctttcatccacgtctccagctacgacgagctggagctcaaagccaccaggctccacccaatgcgacagagcagcctatacacagtgacaagaatggagtccatgagcgtggtattcgactccaacgatggggacagtgccaggtccagtcaccagaagagagggacgaccagagacgtaggctccaatgtctgctcccgcaggaactccaagtccacctccaccacagccagcttcgtgagctcctcccacatgtcggtggaagaaggctcttgatttctctctggggtcaaggccactgcaggcaccccttctcctgtcactgctgctgtctctcactctctggaagctgaaggacagtttttagacagctacgcttacaataagacagattgcacataaatataacaaaaatactactaagatatgagctctccccccaaaaaaagaacaaaatgggctttaagagtatgccttgaaaactctaaattattaatatgatacaaacaaaaatatagatccgagaaatatttataaagtgtccagttttgcttatttaaaagtcactgtgcacatttgtgacactgatatggtagttttttcccaaaatattaaagtttaaaatttaatactgtcagtgaagagaagccatgttttccattacagagcatagaatggaaaagttaaatgactcattttcttacaatagtgatggaaatttaacctcaaaaactaacaattaacgaaatctcaagaaaacctattttgtaccataacaattttcaaagacatttaaatgaaaaggaaacctaaatcaaaccactaggcttatctaaatgcctttctcttatttttttctgagaaaatgatttcaaaggaaaaaaatgtagctttgattgttacatattttaaatgccaagttaatatgtagttaaacttaagaccttaaaaggacaaacaaaattcctatgatcctctatttttcagaattttgttctaagtaggtaagttgtaagacattaaatatactttctgagatggaaggaaagaatcccatttgtctctgtaactggctgctagcctttaggcaggaaccacccacagcctcacgtagccatgaaggtggacaggaacacctcccagctccaaggcagttgtttttcccctgtaccccagcaaaagttccagacatgcactttatcaaccatatcgtgtcctcctcctccttcatcaaagaaggagtgtgggcatgggggaaggatcagaatgcgtcttgtgaaaatcctgagaggaaaaagttgtaagaattatgaaagcaaatatagctgatgaagttaatatacatgttggaaaatcagacaggaagtagaaagttgagtcaactctttgaaagatgtaccatagtttgggtcacccgtcaggtgagtgacaatattaccctgctgttccacacagagacctgtacgctctgcataggtaacccttgtccctccagaaaggacgggaaagaggcatttgttttactacaatagtatattttttgagaaccatatttgtgagtgttttatgcctcaatcttgaagcatgaacctttccttaaattaggaatactgtcaatcctgctgaagaaatcacaacccttctggaaatctaaatgtgttatataaacttctgtaaaatattgttaggttttgaaaactgtctaaaataattatctctaacatttatttcattgctatgccttccttagtgtcagaaccaaataacttttcaaagatcagcataaaagcaattatccaatgacaagtgatggtctattgttaccctgatattaatctcccaatcctgctttggagccaaagtcagaaatatttagttgttagtctaaacagcttaacaacatgagtttgagttgaatttcttttaatgacaccaataaacacaaacaagtagatggcacaataaatttgcagacatatacaaccagccaatgaatgtaacaatatcaagaagtaaattaaaattaattctaaaacagtataagtggtctttccagggttcctagaaataacctaataaaatctgtgaaacatgtgtgcacttttttagataaacaaatgtatcataatttagaatctaattgtttgaatgttttaacatgtacgggagcttggtcttcaaatttcatatagtcagccactaacaaagtatatctgaaatacatactcttgaccttcacatgcattacgcaaattcatgctatggcgtttctaaagaaaaaatagtagcttaatcttgttttgttctgtttgtttggaattttttctttagtagatttgttgttgccttgcttaccgagcatcactccttctagtatggcagaaatactgaggtccaggtcacatctcttaaatagttaagaaaaactgacatcatttactcaatagtcatgacttttaaactaagatttattatatataattttcaagttcaagaaatgtaagcaataacagtaaaatgaatgaaaaaggctaaaggttagcccttgtgtctgaatttcgaagctaaaaagtatgaaatgatgcccatgcagagccgctttagtgggctctctgtgagtaaatctatgccagtgttttcacatttgccaaggcttagaagcatttgcctccaaatgcgctctaccccaatactaacgtccacgtccatcttcttcattatttgcagtcaaacactactcaggacactgagcagataggtacaacatcttagggtttattaaatttagatcagcagacaaaaatcctaaactatgttgagaaaaatatgggaaaaaaaagccttgccttgttttaaatattctcctttttgaaagaacatgctagtaaaacaaacaaacattgaatttctattattttgcacctggacaaagtgactgaagtggcctgccggggaaaagtttaaagcaaacgcggctttgtggagtccagtctagcttttttttagtggttcagtatgttgttgcatgattccacctcccaggtgacatttctgacccagaagccacatttacgttttcaggacgtaaatctgaaaatctcttgcaaaaagaaatctggccaacttcaaagttccgccgcccttagaaggcacacaaagcaccaagaagcttagtactaaacctaacaaacacaaaataaatgtaaaaaccaacactagttacctcagaatttggattggattttgttaatgcagaatttccccagaaacctgtaatcagtgtctgttaaattgctccattacatacaaagacaggaggattaaaacaattcaactaacagtaacaatctgagttccattttcctttgatggtgtgccagaagttaaggaaatcaagcataacattggccatgaagaaaaaaattgtaacaatctcactggaggccaaacaggaatggagaatcacatttaatggagctgtacaaagtcatttattgtgtgatttaatatacattactgaaatcctgcgagcaagaatttcatatatataaaatttgtaggcagtgcataaagtatttttcaagttgtggaaattatactgagtatgctaaaaattccatcttctgtatatgtgccagtattttggaaagtttaaatccaatgtttttatttaaatatattaaaaatcatatgaaaaat

SEQ ID NO: 545 - protein, 440 aa, Homo sapiens [sequence omitted]

SEQ ID NO: 546 - DNA, 1014 bp, Homo sapiens
atggatgaaacaggaaatctgacagtatcttctgccacatgccatgacactattgatgacttccgcaatcaagtgtattccaccttgtactctatgatctctgttgtaggcttctttggcaatggctttgtgctctatgtcctcataaaaacctatcacaagaagtcagccttccaagtatacatgattaatttagcagtagcagatctactttgtgtgtgcacactgcctctccgtgtggtctattatgttcacaaaggcatttggctctttggtgacttcttgtgccgcctcagcacctatgctttgtatgtcaacctctattgtagcatcttctttatgacagccatgagctttttccggtgcattgcaattgtttttccagtccagaacattaatttggttacacagaaaaaagccaggtttgtgtgtgtaggtatttggatttttgtgattttgaccagttctccatttctaatggccaaaccacaaaaagatgagaaaaataataccaagtgctttgagcccccacaagacaatcaaactaaaaatcatgttttggtcttgcattatgtgtcattgtttgttggctttatcatcccttttgttattataattgtctgttacacaatgatcattttgaccttactaaaaaaatcaatgaaaaaaaatctgtcaagtcataaaaaggctataggaatgatcatggtcgtgaccgctgcctttttagtcagtttcatgccatatcatattcaacgtaccattcaccttcattttttacacaatgaaactaaaccctgtgattctgtccttagaatgcagaagtccgtggtcataaccttgtctctggctgcatccaattgttgctttgaccctctcctatatttcttttctgggggtaactttaggaaaaggctgtctacattcagaaagcattctttgtccagcgtgacttatgtacccagaaagaaggcctctttgccagaaaaaggagaagaaatatgtaaagtatag

SEQ ID NO: 547 - protein, 337 aa, Homo sapiens
MDETGNLTVSSATCHDTIDDFRNQVYSTLYSMISVVGFFGNGFVLYVLIKTYHKKSAFQVYMINLAVADLLCVCTLPLRVVYYVHKGIWLFGDFLCRLSTYALYVNLYCSIFFMTAMSFFRCIAIVFPVQNINLVTQKKARFVCVGIWIFVILTSSPFLMAKPQKDEKNNTKCFEPPQDNQTKNHVLVLHYVSLFVGFIIPFVIIIVCYTMIILTLLKKSMKKNLSSHKKAIGMIMVVTAAFLVSFMPYHIQRTIHLHFLHNETKPCDSVLRMQKSVVITLSLAASNCCFDPLLYFFSGGNFRKRLSTFRKHSLSSVTYVPRKKASLPEKGEEICKV

SEQ ID NO: 548 - DNA, 2699 bp, Homo sapiens
ccacgcgtccgccggctgcacggtcgcaccggcagcggctcaggctccggctcctctcccgctgcagcagccgcgctgccggccccactgggctcggatccggccccggccccctcggcaccgcctgctctggccccggccccggccccgcggaccatgcgctgggcgcccccaggggaaacccgacccggccaagggcccgcaaagacgaggctcccgggccggggcccctcccggccgcccagctctcggccggcgccctgccccgcgtcccggagccgcgtgagcctgcggggccatggagcgcgcgccgcccgacgggccgctgaacgcttcgggggcgctggcgggcgatgcggcggcggcgggcggggcgcgcggcttctcggcagcctggaccgcggtgctggccgcgctcatggcgctgctcatcgtggccacggtgctgggcaacgcgctggtcatgctcgccttcgtggccgactcgagcctccgcacccagaacaacttcttcctgctcaacctcgccatctccgacttcctcgtcggcgccttctgcatcccactgtatgtaccctacgtgctgacaggccgctggaccttcggccggggcctctgcaagctgtggctggtagtggactacctgctgtgcacctcctctgccttcaacatcgtgctcatcagctacgaccgcttcctgtcggtcacccgagcggtctcataccgggcccagcagggtgacacgcggcgggcagtgcggaagatgctgctggtgtgggtgctggccttcctgctgtacggaccagccatcctgagctgggagtacctgtccgggggcagctccatccccgagggccactgctatgccgagttcttctacaactggtacttcctcatcacggcttccaccctggagttctttacgcccttcctcagcgtcaccttctttaacctcagcatctacctgaacatccagaggcgcacccgcctccggctggatggggctcgagaggcagccggccccgagccccctcccgaggcccagccctcaccacccccaccgcctggctgctggggctgctggcagaaggggcacggggaggccatgccgctgcacaggtatggggtgggtgaggcggccgtaggcgctgaggccggggaggcgaccctcgggggtggcggtgggggcggctccgtggcttcacccacctccagctccggcagctcctcgaggggcactgagaggccgcgctcactcaagaggggctccaagccgtcggcgtcctcggcctcgctggagaagcgcatgaagatggtgtcccagagcttcacccagcgctttcggctgtctcgggacaggaaagtggccaagtcgctggccgtcatcgtgagcatctttgggctctgctgggccccatacacgctgctgatgatcatccgggccgcctgccatggccactgcgtccctgactactggtacgaaacctccttctggctcctgtgggccaactcggctgtcaaccctgtcctctaccctctgtgccaccacagcttccgccgggccttcaccaagctgctctgcccccagaagctcaaaatccagccccacagctccctggagcactgctggaagtgagtggcccaccagagcctccctcagccacgcctctctcagcccaggtctcctgggcatctggccctgctgccccctacccggctcgttcccccaggggtgagccccgccgtgtctgtggccctctcttaatgccacggcagccaccctgccatggaggcgccttcctgggttggccagagggcccctcactggctggactggaggctgggtggccggccctgccccccacattctggctccaccggggagggacagtctggaggtcccagacatgctgcccaccccctgctggtgcccacccttcgcagttactggttggtgttcttcccaaagcaagcacctgggtgtgctccaggcttcctgccctagcagtttgcctctgcacgtgcacacacctgcacacccctgcacacacctgcacaccgtccctctccccggacaagcccaggacactgcctttgctgccttctgtctcttgcataagcctcaggcctggccctttcacccctcttcccaccaactctctctgcccccaaaagtgtcaaggggccctaggaacctcgaagctgttctctgcttttccattctgggtgttttcagaaagatgaagaagaaaacatgtctgtgaacttgatgttcgtgggatgtttaatcaagagagacaaaattgctgaggagctcagggctggattggcaggtgtgggctcccacgccctcctccctccgctaaggcttccggctgagctgtgccagctgcttctgcccaccccgcctctgggctcacaccagccctggtggccaagcctgccccggccactctgtttgctcacccaggacctctgggggttgttgggaggagggggcccggctgggcccgagggtcccaaggcgtgcaggggcggtccagaggaggtgcccgggcaggggccgcttcgccatgtgctgtgcacccgtgccacgcgctctgcatgctcctctgcctgtgcccgctgcgctgccctgcaaaccgtgaggtcacaataaagtgtatttttttaaaaaaaaaaaaaaaaaaaaaaaaaaa

SEQ ID NO: 549 - protein, 445 aa, Homo sapiens
MERAPPDGPLNASGALAGDAAAAGGARGFSAAWTAVLAALMALLIVATVLGNALVMLAFVADSSLRTQNNFFLLNLAISDFLVGAFCIPLYVPYVLTGRWTFGRGLCKLWLVVDYLLCTSSAFNIVLISYDRFLSVTRAVSYRAQQGDTRRAVRKMLLVWVLAFLLYGPAILSWEYLSGGSSIPEGHCYAEFFYNWYFLITASTLEFFTPFLSVTFFNLSIYLNIQRRTRLRLDGAREAAGPEPPPEAQPSPPPPPGCWGCWQKGHGEAMPLHRYGVGEAAVGAEAGEATLGGGGGGGSVASPTSSSGSSSRGTERPRSLKRGSKPSASSASLEKRMKMVSQSFTQRFRLSRDRKVAKSLAVIVSIFGLCWAPYTLLMIIRAACHGHCVPDYWYETSFWLLWANSAVNPVLYPLCHHSFRRAFTKLLCPQKLKIQPHSSLEHCWK

SEQ ID NO: 550 - DNA, 1110 bp, Homo sapiens
agcggccgctgccctgacccgacgggtatcagccggctctccccctccaccccaggacgacatgaacgaccgaggccagggagtcctctccttgggcctctgcatccccccatccttggctctggggtaggcccagggaggagacacccccaacccctatccggtctgtcctggagaaaagagactgcccttccatgcccctgagtgaggggcctggggccaggctgcctgtgttccccaagggcaagggtctctctgttgaggaggggggcctgtcagccacaacttctttcctcctgagcgccccatctccctctctgcaccctgcaattcccacccctccgtatttatttccctggtcccgccgacagtccctccttgtctgtctccgggattcaggcctccctccctgacatggagagtaacctgtctggcctggtgcctgctgccgggctggtgcctgcgctgccacctgctgtgaccctggggctgacagctgcctacaccaccctgtatgccctgctcttcttctccgtctatgcccagctctggctggtgcttctgtatgggcacaagcgtctcagctatcagacggtgttcctggccctctgtctgctctgggccgccttgcgtaccaccctcttctccttctacttccgagatactccccgcgccaaccgcctggggcccttgcccttctggcttctctactgctgccccgtctgcctgcagttcttcaccttgacgcttatgaacctctactttgcccaggtggtgttcaaggccaaggtgaagcgtcggccggagatgagccgaggcttgctcgctgtccgaggggcctttgtgggggcctcgctgctctttctgctggtgaacgtgctgtgtgctgtgctctcccatcggcgcgcacagccctgggccctgctgcttgtccgcgtcctggtgagcgactccctgttcgtcatctgcgcgctgtctcttgctgcctgcctctgcctcgtcgccagcgggcgccctccactagcatctacctggaggccaaggtagggctgcagcactgatgcccaggtgtcttttgggtctctcggcagcggttctcagggtgtagag

SEQ ID NO: 551 - protein, 210 aa, Homo sapiens
MESNLSGLVPAAGLVPALPPAVTLGLTAAYTTLYALLFFSVYAQLWLVLLYGHKRLSYQTVFLALCLLWAALRTTLFSFYFRDTPRANRLGPLPFWLLYCCPVCLQFFTLTLMNLYFAQVVFKAKVKRRPEMSRGLLAVRGAFVGASLLFLLVNVLCAVLSHRRAQPWALLLVRVLVSDSLFVICALSLAACLCLVASGRPPLASTWRPR

SEQ ID NO: 552 - DNA, 1148 bp, Homo sapiens
cttctttaaatttctttctaggatgttcacttcttctccacaatgaatgagtgtcactatgacaagcacatggactttttttataataggagcaacactgatactgtcgatgactggacaggaacaaagcttgtgattgttttgtgtgttgggacgtttttctgcctgtttatttttttttctaattctctggtcatcgcggcagtgatcaaaaacagaaaatttcatttccccttctactacctgttggctaatttagctgctgccgatttcttcgctggaattgcctatgtattcctgatgtttaacacaggcccagtttcaaaaactttgactgtcaaccgctggtttctccgtcaggggcttctggacagtagcttgactgcttccctcaccaacttgctggttatcgccgtggagaggcacatgtcaatcatgaggatgcgggtccatagcaacctgaccaaaaagagggtgacactgctcattttgcttgtctgggccatcgccatttttatgggggcggtccccacactgggctggaattgcctctgcaacatctctgcctgctcttccctggcccccatttacagcaggagttaccttgttttctggacagtgtccaacctcatggccttcctcatcatggttgtggtgtacctgcggatctacgtgtacgtcaagaggaaaaccaacgtcttgtctccgcatacaagtgggtccatcagccgccggaggacacccatgaagctaatgaagacggtgatgactgtcttaggggcgtttgtggtatgctggaccccgggcctggtggttctgctcctcgacggcctgaactgcaggcagtgtggcgtgcagcatgtgaaaaggtggttcctgctgctggcgctgctcaactccgtcgtgaaccccatcatctactcctacaaggacgaggacatgtatggcaccatgaagaagatgatctgctgcttctctcaggagaacccagagaggcgtccctctcgcatcccctccacagtcctcagcaggagtgacacaggcagccagtacatagaggatagtattagccaaggtgcagtctgcaataaaagcacttcctaaactctggatgcctctcggcccacccaggtgatgactgtcttagg

SEQ ID NO: 553 - protein, 353 aa, Homo sapiens
MNECHYDKHMDFFYNRSNTDTVDDWTGTKLVIVLCVGTFFCLFIFFSNSLVIAAVIKNRKFHFPFYYLLANLAAADFFAGIAYVFLMFNTGPVSKTLTVNRWFLRQGLLDSSLTASLTNLLVIAVERHMSIMRMRVHSNLTKKRVTLLILLVWAIAIFMGAVPTLGWNCLCNISACSSLAPIYSRSYLVFWTVSNLMAFLIMVVVYLRIYVYVKRKTNVLSPHTSGSISRRRTPMKLMKTVMTVLGAFVVCWTPGLVVLLLDGLNCRQCGVQHVKRWFLLLALLNSVVNPIIYSYKDEDMYGTMKKMICCFSQENPERRPSRIPSTVLSRSDTGSQYIEDSISQGAVCNKSTS

SEQ ID NO: 554 - DNA, 1092 bp, Homo sapiens
atgggccccggcgaggcgctgctggcgggtcttctggtgatggtactggccgtggcgctgctatccaacgcactggtgctgctttgttgcgcctacagcgctgagctccgcactcgagcctcaggcgtcctcctggtgaatctgtctctgggccacctgctgctggcggcgctggacatgcccttcacgctgctcggtgtgatgcgcgggcggacaccgtcggcgcccggcgcatgccaagtcattggcttcctggacaccttcctggcgtccaacgcggcgctgagcgtggcggcgctgagcgcagaccagtggctggcagtgggcttcccactgcgctacgccggacgcctgcgaccgcgctatgccggcctgctgctgggctgtgcctggggacagtcgctggccttctcaggcgctgcacttggctgctcgtggcttggctacagcagcgccttcgcgtcctgttcgctgcgcctgccgcccgagcctgagcgtccgcgcttcgcagccttcaccgccacgctccatgccgtgggcttcgtgctgccgctggcggtgctctgcctcacctcgctccaggtgcaccgggtggcacgcagacactgccagcgcatggacaccgtcaccatgaaggcgctcgccgtgctcgccgacctgcaccccagtgtgcggcacggctgcctcatccagcagaagcggcgccgccaccgcgccaccaggaagattggcattgctattgcgaccttcctcatctgctttgccccgtatgtcatgaccaggctggcggagctcgtgcccttcgtcaccgtgaacgcccagtggggcatcctcagcaagtgcctgacctacagcaaggcggtggccgacccgttcacgtactctctgctccgccggccgttccgccaagtcctggccggcatggtgcaccggctgctgaagagaaccccgcgcccagcatccacccatgacagctctctggatgtggccggcatggtgcaccagctgctgaagagaaccccgcgcccagcgtccacccacaacggctctgtggacacagagaatgattcctgcctgcagcagacacactga

SEQ ID NO: 555 - protein, 363 aa, Homo sapiens
MGPGEALLAGLLVMVLAVALLSNALVLLCCAYSAELRTRASGVLLVNLSLGHLLLAALDMPFTLLGVMRGRTPSAPGACQVIGFLDTFLASNAALSVAALSADQWLAVGFPLRYAGRLRPRYAGLLLGCAWGQSLAFSGAALGCSWLGYSSAFASCSLRLPPEPERPRFAAFTATLHAVGFVLPLAVLCLTSLQVHRVARRHCQRMDTVTMKALALLADLHPSVRQRCLIQQKRRRHRATRKIGIAIATFLICFAPYVMTRLAELVPFVTVNAQWGILSKCLTYSKAVADPFTYSLLRRPFRQVLAGMVHRLLKRTPRPASTHDSSLDVAGMVHQLLKRTPRPASTHNGSVDTENDSCLQQTH

SEQ ID NO: 556 - DNA, 1239 bp, Homo sapiens
atggaaaaacttcagaatgcttcctggatctaccagcagaaactagaagatccattccagaaacacctgaacagcaccgaggagtatctggccttcctctgcggacctcggcgcagccacttcttcctccccgtgtctgtggtgtatgtgccaatttttgtggtgggggtcattggcaatgtcctggtgtgcctggtgattctgcagcaccaggctatgaagacgcccaccaactactacctcttcagcctggcggtctctgacctcctggtcctgctccttggaatgcccctggaggtctatgagatgtggcgcaactaccctttcttgttcgggcccgtgggctgctacttcaagacggccctctttgagaccgtgtgcttcgcctccatcctcagcatcaccaccgtcagcgtggagcgctacgtggccatcctacacccgttccgcgccaaactgcagagcacccggcgccgggccctcaggatcctcggcatcgtctggggcttctccgtgctcttctccctgcccaacaccagcatccatggcatcaagttccactacttccccaatgggtccctggtcccaggttcggccacctgtacggtcatcaagcccatgtggatctacaatttcatcatccaggtcacctccttcctattctacctcctccccatgactgtcatcagtgtcctctactacctcatggcactcagactaaagaaagacaaatctcttgaggcagatgaagggaatgcaaatattcaaagaccctgcagaaaatcagtcaacaagatgctgtttgtcttggtcttagtgtttgctatctgttgggccccgttccacattgaccgactcttcttcagctttgtggaggagtggagtgaatccctggctgctgtgttcaacctcgtccatgtggtgtcaggtgtcttcttctacctgagctcagctgtcaaccccattatctataacctactgtctcgccgcttccaggcagcattccagaatgtgatctcttctttccacaaacagtggcactcccagcatgacccacagttgccacctgcccagcggaacatcttcctgacagaatgccactttgtggagctgaccgaagatataggtccccaattcccatgtcagtcatccatgcacaactctcacctcccaacagccctctctagtgaacagatgtcaagaacaaactatcaaagcttccactttaacaaaacctga

SEQ ID NO: 557 - protein, 412 aa, Homo sapiens
MEKLQNASWIYQQKLEDPFQKHLNSTEEYLAFLCGPRRSHFFLPVSVVYVPIFVVGVIGNVLVCLVILQHQAMKTPTNYYLFSLAVSDLLVLLLGMPLEVYEMWRNYPFLFGPVGCYFKTALFETVCFASILSITTVSVERYVAILHPFRAKLQSTRRRALRILGIVWGFSVLFSLPNTSIHGIKFHYFPNGSLVPGSATCTVIKPMWIYNFIIQVTSFLFYLLPMTVISVLYYLMALRLKKDKSLEADEGNANIQRPCRKSVNKMLFVLVLVFAICWAPFHIDRLFFSFVEEWSESLAAVFNLVHVVSGVFFYLSSAVNPIIYNLLSRRFQAAFQNVISSFHKQWHSQHDPQLPPAQRNIFLTECHFVELTEDIGPQFPCQSSMHNSHLPTALSSEQMSRTNYQSFHFNKT

SEQ ID NO: 558 - DNA, 1260 bp, Homo sapiens
atgctggcagctgcctttgcagactctaactccagcagcatgaatgtgtcctttgctcacctccactttgccggagggtacctgccctctgattcccaggactggagaaccatcatcccggctctcttggtggctgtctgcctggtgggcttcgtgggaaacctgtgtgtgattggcatcctccttcacaatgcttggaaaggaaagccatccatgatccactccctgattctgaatctcagcctggctgatctctccctcctgctgttttctgcacctatccgagctacggcgtactccaaaagtgtttgggatctaggctggtttgtctgcaagtcctctgactggtttatccacacatgcatggcagccaagagcctgacaatcgttgtggtggccaaagtatgcttcatgtatgcaagtgacccagccaagcaagtgagtatccacaactacaccatctggtcagtgctggtggccatctggactgtggctagcctgttacccctgccggaatggttctttagcaccatcaggcatcatgaaggtgtggaaatgtgcctcgtggatgtaccagctgtggctgaagagtttatgtcgatgtttggtaagctctacccactcctggcatttggccttccattattttttgccagcttttatttctggagagcttatgaccaatgtaaaaaacgaggaactaagactcaaaatcttagaaaccagatacgctcaaagcaagtcacagtgatgctgctgagcattgccatcatctctgctctcttgtggctccccgaatgggtagcttggctgtgggtatggcatctgaaggctgcaggcccggccccaccacaaggtttcatagccctgtctcaagtcttgatgttttccatctcttcagcaaatcctctcatttttcttgtgatgtcggaagagttcagggaaggcttgaaaggtgtatggaaatggatgataaccaaaaaacctccaactgtctcagagtctcaggaaacaccagctggcaactcagagggtcttcctgacaaggttccatctccagaatccccagcatccataccagaaaaagagaaacccagctctccctcctctggcaaagggaaaactgagaaggcagagattcccatccttcctgacgtagagcagttttggcatgagagggacacagtcccttctgtacaggacaatgaccctatcccctgggaacatgaagatcaagagacaggggaaggtgttaaatag

SEQ ID NO: 559 - protein, 418 aa, Homo sapiens
MLAAAFADSNSSSMNVSFAHLHFAGGYLPSDSQDWRTIIPALLVAVCLVGFVGNLCVIGILLHNAWKGKPSMIHSLILNLSLADLSLLLFSAPIRATAYSKSVWDLGWFVCKSSDWFIHTCMAAKSLTIVVVAKVCFMYASDPAKQVSIHNYTIWSVLVAIWTVASLLPLPEWFFSTIRHHEGVEMCLVDVPAVAEEFMSMFGKLYPLLAFGLPLFFASFYFWRAYDQCKKRGTKTQNLRNQIRSKQVTVMLLSIAIISALLWLPEWVAWLWVWHLKAAGPAPPQGFIALSQVLMFSISSANPLIFLVMSEEFREGLKGVWKWMITKKPPTVSESQETPAGNSEGLPDKVPSPESPASIPEKEKPSSPSSGKGKTEKAEIPILPDVEQFWHERDTVPSVQDNDPIPWEHEDQETGEGV

SEQ ID NO: 560 - DNA, 1254 bp, Homo sapiens
atggagtcctcacccatcccccagtcatcagggaactcttccactttggggagggtccctcaaaccccaggtccctctactgccagtggggtcccggaggtggggctacgggatgttgcttcggaatctgtggccctcttcttcatgctcctgctggacttgactgctgtggctggcaatgccgctgtgatggccgtgatcgccaagacgcctgccctccgaaaatttgtcttcgtcttccacctctgcctggtggacctgctggctgccctgaccctcatgcccctggccatgctctccagccctgccctctttgaccacgccctctttggggaggtggcctgccgcctctacttgtttctgagcgtgtgctttgtcagcctggccatcctctcggtgtcagccatcaatgtggagcgctactattacgtagtccaccccatgcgctacgaggtgcgcatgacgctggggctggtggcctctgtgctggtgggtgtgtgggtgaaggccttggccatggcttctgtgccagtgttgggaagggtctcctgggaggaaggagctcccagtgtccccccacactgttcactccagtggagccacagtgcctactgccagctttttgtggtggtctttgctgtcctttactttctgttgcccctgctcctcatacttctggtctactgcagcatgttccgagtggcccgcgtggctgccatgccagacgggccgctgcccacgtggatggagacaccccggcaacgctccgaatctctcagcagccgctccacgatggtcaccagctcgggggccccccagaccaccccacaccggacgtttgggggagggaaagcagcagtggttctcctggctgtggggggacagttcctgctctgttggttgccctacttctctttccacctctatgttgccctgagtgctcagcccatttcaactgggcaggtggagagtgtggtcacctggattggctacttttgcttcacttccaaccctttcttctatggatgtctcaaccggcagatccggggggagctcagcaagcagtttgtctgcttcttcaagccagctccagaggaggagctgaggctgcctagccgggagggctccattgaggagaacttcctgcagttccttcaggggactggctgtccttctgagtcctgggtttcccgacccctacccagccccaagcaggagccacctgctgttgactttcgaatccaggccagatag

SEQ ID NO: 561 - protein, 417 aa, Homo sapiens
MESSPIPQSSGNSSTLGRVPQTPGPSTASGVPEVGLRDVASESVALFFMLLLDLTAVAGNAAVMAVIAKTPALRKFVFVFHLCLVDLLAALTLMPLAMLSSPALFDHALFGEVACRLYLFLSVCFVSLAILSVSAINVERYYYVVHPMRYEVRMTLGLVASVLVGVWVKALAMASVPVLGRVSWEEGAPSVPPHCSLQWSHSAYCQLFVVVFAVLYFLLPLLLILLVYCSMFRVARVAAMPDGPLPTWMETPRQRSESLSSRSTMVTSSGAPQTTPHRTFGGGKAAVVLLAVGGQFLLCWLPYFSFHLYVALSAQPISTGQVESVVTWIGYFCFTSNPFFYGCLNRQIRGELSKQFVCFFKPAPEEELRLPSREGSIEENFLQFLQGTGCPSESWVSRPLPSPKQEPPAVDFRIQAR

SEQ ID NO: 562 - DNA, 1197 bp, Homo sapiens
atggagtcggggctgctgcggccggcgccggtgagcgaggtcatcgtcctgcattacaactacaccggcaagctccgcggtgcgcgctaccagccgggtgccggcctgcgcgccgacgccgtggtgtgcctggcggtgtgcgccttcatcgtgctagagaatctagccgtgttgttggtgctcggacgccacccgcgcttccacgctcccatgttcctgctcctgggcagcctcacgttgtcggatctgctggcaggcgccgcctacgccgccaacatcctactgtcggggccgctcacgctgaaactgtcccccgcgctctggttcgcacgggagggaggcgtcttcgtggcactcactgcgtccgtgctgagcctcctggccatcgcgctggagcgcagcctcaccatggcgcgcagggggcccgcgcccgtctccagtcgggggcgcacgctggcgatggcagccgcggcctggggcgtgtcgctgctcctcgggctcctgccagcgctgggctggaattgcctgggtcgcctggacgcttgctccactgtcttgccgctctacgccaaggcctacgtgctcttctgcgtgctcgccttcgtgggcatcctggccgcgatctgtgcactctacgcgcgcatctactgccaggtacgcgccaacgcgcggcgcctgccggcacggcccgggactgcggggaccacctcgacccgggcgcgtcgcaagccgcgctcgctggccttgctgcgcacgctcagcgtggtgctcctggcctttgtggcatgttggggccccctcttcctgctgctgttgctcgacgtggcgtgcccggcgcgcacctgtcctgtactcctgcaggccgatcccttcctgggactggccatggccaactcacttctgaaccccatcatctacacgctcaccaaccgcgacctgcgccacgcgctcctgcgcctggtctgctgcggacgccactcctgcggcagagacccgagtggctcccagcagtcggcgagcgcggctgaggcttccgggggcctgcgccgctgcctgcccccgggccttgatgggagcttcagcggctcggagcgctcatcgccccagcgcgacgggctggacaccagcggctccacaggcagccccggtgcacccacagccgcccggactctggtatcagaaccggctgcagactga

SEQ ID NO: 563 - protein, 398 aa, Homo sapiens
MESGLLRPAPVSEVIVLHYNYTGKLRGARYQPGAGLRADAVVCLAVCAFIVLENLAVLLVLGRHPRFHAPMFLLLGSLTLSDLLAGAAYAANILLSGPLTLKLSPALWFAREGGVFVALTASVLSLLAIALERSLTMARRGPAPVSSRGRTLAMAAAAWGVSLLLGLLPALGWNCLGRLDACSTVLPLYAKAYVLFCVLAFVGILAAICALYARIYCQVRANARRLPARPGTAGTTSTRARRKPRSLALLRTLSVVLLAFVACWGPLFLLLLLDVACPARTCPVLLQADPFLGLAMANSLLNPIIYTLTNRDLRHALLRLVCCGRHSCGRDPSGSQQSASAAEASGGLRRCLPPGLDGSFSGSERSSPQRDGLDTSGSTGSPGAPTAARTLVSEPAAD

SEQ ID NO: 564 - DNA, 1149 bp, Homo sapiens
gttgaggcaccgtgtgctggccttgtccctccaggccagagcgcggcagcccttacccccacagcgctgcagccctgcagctggccctcagccctgggaggagccttccttttccagagagacctcgccctgcactttcagcttccctatggcctccgccttcctagaggcctcccggtagcgccactgcctggagggttggtaggagctctcgtcgctcactgggccctgccggccccgcgtgaggcccagcaaggcccggctctggtggaggaagttggggctagagaagcagtagagcacggggtccaggacactgttgaggtaggtgaaggccagggagccatggaagagctgtgtgcagaggtccagggatcggcaggcggacagccagaaagccaccatggaagccatgccaaagatgatgctgggcaagaagcagatggtgtagacggccaccaccatggccagcacacgcatggccctctgcgggcctgcctgcccgcccagaccacggttccggatggtgagcccaatgctcacaatagcaaagaggatgagcgccagtggcaggaagaactccagcaggtacagtgcctggtgccagcggagcgaggccgagggcttcgtgcccaccctgtagctgaggcaggaggggccggagaaggtgctcaggagcaggtgcccgttgaggagcaggatgcccacccagagtcccccggccacccgggcagctgcccccacggaagcacggctcagcacgtggtggggctgcaccaccttcaggtagcggttgagtgcgatggctgtgaggaagacaacgctggccgtgcggttggtggacagcatgaagaggttgactttgcaggcagcagccccaaagcgccaggtctcatggaggaggtagtagtccacgcggaggggcaggttgctgatcaggaggaagtcagcggccaccaggctgaccaggaacaccgtgttggaggtccagggccgcgtgtggatgcagaagatgaagagggccaaactgttccccaccaggcccaggacaaactccagggccaggattggtgccaggaaggcagacaccagcgaggaagaggtggggtggcagggccctccagaggacccccccacagtggtaaaggc

SEQ ID NO: 565 - protein, 384 aa, Homo sapiens
MELHNLSSPSPSLSSSVLPPSFSPSPSSAPSAFTTVGGSSGGPCHPTSSSLVSAFLAPILALEFVLGLVGNSLALFIFCIHTRPWTSNTVFLVSLVAADFLLISNLPLRVDYYLLHETWRFGAAACKVNLFMLSTNRTASVVFLTAIALNRYLKVVQPHHVLSRASVGAAARVAGGLWVGILLLNGHLLLSTFSGPSCLSYRVGTKPSASLRWHQALYLLEFFLPLALILFAIVSIGLTIRNRGLGGQAGPQRAMRVLAMVVAVYTICFLPSIIFGMASMVAFWLSACRSLDLCTQLFHGSLAFTYLNSVLDPVLYCFSSPNFLHQSRALLGLTRGRQGPVSDESSYQPSRQWRYREASRKAEAIGKLKVQGEVSLEKEGSSQG

SEQ ID NO: 566 - DNA, 1380 bp, Homo sapiens
ggttatggtttaactcagcagaatttgttgaacaactacgacatgctggggatcatggcatggaatgcaacttgcaaaaactggctggcagcagaggctgccctggaaaagtactacctttccattttttatgggattgagttcgttgtgggagtccttggaaataccattgttgtttacggctacatcttctctctgaagaactggaacagcagtaatatttatctctttaacctctctgtctctgacttagcttttctgtgcaccctccccatgctgataaggagttatgccaatggaaactggatatatggagacgtgctctgcataagcaaccgatatgtgcttcatgccaacctctataccagcattctctttctcacttttatcagcatagatcgatacttgataattaagtatcctttccgagaacaccttctgcaaaagaaagagtttgctattttaatctccttggccatttgggttttagtaaccttagagttactacccatacttccccttataaatcctgttataactgacaatggcaccacctgtaatgattttgcaagttctggagaccccaactacaacctcatttacagcatgtgtctaacactgttggggttccttattcctctttttgtgatgtgtttcttttattacaagattgctctcttcctaaagcagaggaataggcaggttgctactgctctgccccttgaaaagcctctcaacttggtcatcatggcagtggtaatcttctctgtgctttttacaccctatcacgtcatgcggaatgtgaggatcgcttcacgcctggggagttggaagcagtatcagtgcactcaggtcgtcatcaactccttttacattgtgacacggcctttggcctttctgaacagtgtcatcaaccctgtcttctattttcttttgggagatcacttcagggacatgctgatgaatcaactgagacacaacttcaaatcccttacatcctttagcagatgggctcatgaactcctactttcattcagagaaaagtgaggggcttgtgaaacagattgttctacagatgaatctgtaagccagttacagtttgccttaactcatagacatcaatcagagagtgtcacagatttaaccttgatctaaagacaagttgtacccagagtatgtgaaaagaatgggacgacaagaatgtactggtttcttcctctaagaattgaaaggagttgaactgccttatgtttgggcatgtaactccaaaatactaggtagtataaggctttctcaatcagtgcaaaaatggaagatatataaagcaacaagttgtctgcatttgatcactggtcagattgtaaaaaaaaaaaaaaaaaa

SEQ ID NO: 567 - protein, 330 aa, Homo sapiens
MAWNATCKNWLAAEAALEKYYLSIFYGIEFVVGVLGNTIVVYGYIFSLKNWNSSNIYLFNLSVSDLAFLCTLPMLIRSYANGNWIYGDVLCISNRYVLHANLYTSILFLTFISIDRYLIIKYPFREHLLQKKEFAILISLAIWVLVTLELLPILPLINPVITDNGTTCNDFASSGDPNYNLIYSMCLTLLGFLIPLFVMCFFYYKIALFLKQRNRQVATALPLEKPLNLVIMAVVIFSVLFTPYHVMRNVRIASRLGSWKQYQCTQVVINSFYIVTRPLAFLNSVINPVFYFLLGDHFRDMLMNQLRHNFKSLTSFSRWAHELLLSFREK

SEQ ID NO: 568 - DNA, 1892 bp, Homo sapiens
tggagccatgctccctgggctcttccgcgggcgcccgcgcgctgcccttcgcttgaggcaaaaggactcttgtggaagatggaactcattgtccattttccagaatgtatttccaagcccatcaatgggacctgatactgctgttctgtgttgaaatgcttgaagaactcctgcatctctgcttgcatcttccatcctactgaaaccatggtcttctcggcagtgttgactgcgttccataccgggacatccaacacaacatttgtcgtgtatgaaaacacctacatgaatattacactccctccaccattccagcatcctgacctcagtccattgcttagatatagttttgaaaccatggctcccactggtttgagttccttgaccgtgaatagtacagctgtgcccacaacaccagcagcatttaagagcctaaacttgcctcttcagatcaccctttctgctataatgatattcattctgtttgtgtcttttcttgggaacttggttgtttgcctcatggtttaccaaaaagctgccatgaggtctgcaattaacatcctccttgccagcctagcttttgcagacatgttgcttgcagtgctgaacatgccctttgccctggtaactattcttactacccgatggatttttgggaaattcttctgtagggtatctgctatgtttttctggttatttgtgatagaaggagtagccatcctgctcatcattagcatagataggttccttattatagtccagaggcaggataagctaaacccatatagagctaaggttctgattgcagtttcttgggcaacttccttttgtgtagcttttcctttagccgtaggaaaccccgacctgcagataccttcccgagctccccagtgtgtgtttgggtacacaaccaatccaggctaccaggcttatgtgattttgatttctctcatttctttcttcatacccttcctggtaatactgtactcatttatgggcatactcaacacccttcggcacaatgccttgaggatccatagctaccctgaaggtatatgcctcagccaggccagcaaactgggtctcatgagtctgcagagacctttccagatgagcattgacatgggctttaaaacacgtgccttcaccactattttgattctctttgctgtcttcattgtctgctgggccccattcaccacttacagccttgtggcaacattcagtaagcacttttactatcagcacaacttttttgagattagcacctggctactgtggctctgctacctcaagtctgcattgaatccgctgatctactactggaggattaagaaattccatgatgcttgcctggacatgatgcctaagtccttcaagtttttgccgcagctccctggtcacacaaagcgacggatacgtcctagtgctgtctatgtgtgtggggaacatcggacggtggtgtgaatattggaactggctgacattttgggtgatgcttgttctttattgacattgaattctctttctcatagcctctccactttatttttttttatagggtttgtgtatgtatgtgtgtgagcagtgtaaagaaagaatggtaattatagttctgttaccaagaataaataataggaaagtgattacaaatattacctccagggttcaatagaaatcctcaatttagggtgaggagacttttttttggttttggggtttttccttgattgattttgttttcatagtgggaatcaggattgtgctttattgagcctgcagttacattgaattgtaggtgtttcgtgtgctgctaaggtatgcttatttgagtttatcaagacttttttttttctggaagacactgctgcttttaccatcacattggagcc

SEQ ID NO: 569 - protein, 419 aa, Homo sapiens
MVFSAVLTAFHTGTSNTTFVVYENTYMNITLPPPFQHPDLSPLLRYSFETMAPTGLSSLTVNSTAVPTTPAAFKSLNLPLQITLSAIMIFILFVSFLGNLVVCLMVYQKAAMRSAINILLASLAFADMLLAVLNMPFALVTILTTRWIFGKFFCRVSAMFFWLFVIEGVAILLIISIDRFLIIVQRQDKLNPYRAKVLIAVSWATSFCVAFPLAVGNPDLQIPSRAPQCVFGYTTNPGYQAYVILISLISFFIPFLVILYSFMGILNTLRHNALRIHSYPEGICLSQASKLGLMSLQRPFQMSIDMGFKTRAFTTILILFAVFIVCWAPFTTYSLVATFSKHFYYQHNFFEISTWLLWLCYLKSALNPLIYYWRIKKFHDACLDMMPKSFKFLPQLPGHTKRRIRPSAVYVCGEHRTVV

SEQ ID NO: 570 - DNA, 3088 bp, Homo sapiens
ttgcttgagtcatcttctgaagctttaaaaacaattgatgaattggccttcaagatagacctaaatagcacatcacatgtgaatattacaactcggaacttggctctcagcgtatcatccctgttaccagggacaaatgcaatttcaaattttagcattggtcttccaagcaataatgaatcgtatttccagatggattttgagagtggacaagtggatccactggcatctgtaattttgcctccaaacttacttgagaatttaagtccagaagattctgtattagttagaagagcacagtttactttcttcaacaaaactggacttttccaggatgtaggaccccaaagaaaaactttagtgagttatgtgatggcgtgcagtattggaaacattactatccagaatctgaaggatcctgttcaaataaaaatcaaacatacaagaactcaggaagtgcatcatcccatctgtgccttctgggatctgaacaaaaacaaaagttttggaggatggaacacgtcaggatgtgttgcacacagagattcagatgcaagtgagacagtctgcctgtgtaaccacttcacacactttggagttctgatggaccttccaagaagtgcctcacagttagatgcaagaaacactaaagtcctcactttcatcagctatattgggtgtggaatatctgctattttttcagcagcaactctcctgacatatgttgcttttgagaaattgcgaagggattatccctccaaaatcttgatgaacctgagcacagccctgctgttcctgaatctcctcttcctcctagatggctggatcacctccttcaatgtggatggactttgcattgctgttgcagtcctgttgcatttcttccttctggcaacctttacctggatggggctagaagcaattcacatgtacattgctctagttaaagtatttaacacttacattcgccgatacattctaaaattctgcatcattggctggggtttgcctgccttagtggtgtcagttgttctagcgagcagaaacaacaatgaagtctatggaaaagaaagttatgggaaagaaaaaggtgatgaattctgttggattcaagatccagtcatattttatgtgacctgtgctgggtattttggagtcatgttttttctgaacattgccatgttcattgtggtaatggtgcagatctgtgggaggaatggcaagagaagcaaccggaccctgagagaagaagtgttaaggaacctgcgcagtgtggttagcttgacctttctgttgggcatgacatggggttttgcattctttgcctggggacccttaaatatccccttcatgtacctcttctccatcttcaattcattacaaggcttatttatattcatcttccactgtgctatgaaggagaatgttcagaaacagtggcggcggcatctctgctgtggtagatttcggttagcagataactcagattggagtaagacagctaccaatatcatcaagaaaagttctgataatctaggaaaatctttgtcttcaagctccattggttccaactcaacctatcttacatccaaatctaaatccagctctaccacctatttcaaaaggaatagccacacagataatgtctcctatgagcattccttcaacaaaagtggatcactcagacagtgcttccatggacaagtccttgtcaaaactggcccatgctgatggagatcaaacatcaatcatccctgtccatcaggtcattgataaggtcaagggttattgcaatgctcattcagacaacttctataaaaatattatcatgtcagacaccttcagccacagcacaaagttttaatgtctttaagaaaaagaaatcaatctgcagaaatgtgaagatttgcaagcagtgtaaactgcaactagtgatgtaaatgtgctattacctaggtaactgcatatatataaggaatgtattttgttaagaaggcttttgtgaaattcagaatttttctttttaatatatttcttccatggaagagttgtcatcactaaaacttcagtactgagagtaacatgactcagtagccacagaagctatgatttgtaaaatatataattgaatcagagtaatcataatgcaggggagacattcaaattagagacaagggagaagcaatgctgaggaagaccctagatagagctcattttactccacctaatcgttatatctggatatacccattttctgcatcttctttctcaacaataaactgtccttgctttggagactttaagacatttcctaaagcacaaataaaagcctcgtatttccccattgagagttttgttccaaggaatatgaagtgagacatatgggtgagtcataataatcaaaataatttatgaagagctgggtctgcaatagctagtctaaaaactacttgtgtgtcagtcctctggttatagtatataagagcctgaggaggtctggcaagatagatggtgtattatttatggatcaggctgctgcatacaaaccttgcatactattatgcagcttacctaactctcagactattctgagtaatgcttgcttgctaatgaatgtataggagaccacattgtaattgttcttagatgatggagtccatgcagtttcttagaaatcggtctcagtgcatgctgtgctttttcacatttgctctgggttatctgggaagtatcaggttctgggaggcaacagcattaagtgataagaaaaggagacattctggcaaagccaatctgcttaaaggcaaagtccagaacctggaacctagaggcctttctctctgcacgaaaaacaggtagtttgcagtctgagatatgggagagcttttaggctacacagcaacccaagggacctctcaccttttgctgagcttcaatcaggaagctatttgcctggctccagcagatgatgagataatgaggtagtgggttttttattactgttccattttgcaacatcctgcaacaccatcctgggagacaagagcattacccagcttggctttcacgggggagggttgtattcagt

SEQ ID NO: 571 - protein, 512 aa, Homo sapiens
MDFESGQVDPLASVILPPNLLENLSPEDSVLVRRAQFTFFNKTGLFQDVGPQRKTLVSYVMACSIGNITIQNLKDPVQIKIKHTRTQEVHHPICAFWDLNKNKSFGGWNTSGCVAHRDSDASETVCLCNHFTHFGVLMDLPRSASQLDARNTKVLTFISYIGCGISAIFSAATLLTYVAFEKLRRDYPSKILMNLSTALLFLNLLFLLDGWITSFNVDGLCIAVAVLLHFFLLATFTWMGLEAIHMYIALVKVFNTYIRRYILKFCIIGWGLPALVVSVVLASRNNNEVYGKESYGKEKGDEFCWIQDPVIFYVTCAGYFGVMFFLNIAMFIVVMVQICGRNGKRSNRTLREEVLRNLRSVVSLTFLLGMTWGFAFFAWGPLNIPFMYLFSIFNSLQGLFIFIFHCAMKENVQKQWRRHLCCGRFRLADNSDWSKTATNIIKKSSDNLGKSLSSSSIGSNSTYLTSKSKSSSTTYFKRNSHTDNVSYEHSFNKSGSLRQCFHGQVLVKTGPC

SEQ ID NO: 572 - DNA, 1258 bp, Homo sapiens
caccattaggcaaagatagtttctctagagagaatcatgcctgctaattacacgtgtaccaggccagatggagacaatacagattttcgatactttatttatgcagtgacatacactgtcattcttgtgccaggtctcatagggaatatattagccctgtgggtattctatggttatatgaaagaaacaaaacgagctgtgatatttatgataaacttagccattgctgacttactacaagttctttccttgccactgaggatcttctactacttgaatcatgactggccatttgggcctggtctctgcatgttctgtttctacctgaagtatgtcaacatgtatgcaagcatctacttcttggtctgcatcagtgtgcgacgattttggtttctcatgtacccctttcgcttccatgactgcaaacagaaatatgacctgtacatcagcattgctggctggctgatcatctgccttgcctgtgtactctttccactcctcagaaccagtgatgatacctctggcaataggaccaaatgctttgtggatcttcctaccaggaatgtcaacctggcccagtccgttgttatgatgaccattggcgagttgattgggtttgtaactccgcttctgattgtcctatattgtacctggaagacggttttatcactgcaagataaatatcccatggcccaagatcttggagagaaacagaaagccttgaagatgattctaacctgtgcaggggtattcctaatttgctttgcaccttatcatttcagttttcctttagatttcctggtgaagtccaatgaaattaaaagctgcctagccagaagggtgattctaatatttcattctgtggcattgtgtcttgctagtctgaattcatgtcttgacccagtcatatactacttttccactaatgagttccgaagacggctttcaagacaagatttgcatgacagcatccaactccatgcaaaatcctttgtgagtaaccatacagcttccaccatgacacctgaattatgctaaaacaaaaaaccaaactgaatgtgacctgaaatgcaagtacatcagaacatatctgcaatacccaagccacagggaagaacttgcaaaacaacacagcttttcagttctgctctatcttactgctatggggaattcacttcttcaaagcaggacctatttggagcattacgatccacgattattgatgttgacatgtccatgtagtaatttttcttcaagt

SEQ ID NO: 573 - protein, 333 aa, Homo sapiens
MPANYTCTRPDGDNTDFRYFIYAVTYTVILVPGLIGNILALWVFYGYMKETKRAVIFMINLAIADLLQVLSLPLRIFYYLNHDWPFGPGLCMFCFYLKYVNMYASIYFLVCISVRRFWFLMYPFRFHDCKQKYDLYISIAGWLIICLACVLFPLLRTSDDTSGNRTKCFVDLPTRNVNLAQSVVMMTIGELIGFVTPLLIVLYCTWKTVLSLQDKYPMAQDLGEKQKALKMILTCAGVFLICFAPYHFSFPLDFLVKSNEIKSCLARRVILIFHSVALCLASLNSCLDPVIYYFSTNEFRRRLSRQDLHDSIQLHAKSFVSNHTASTMTPELC

SEQ ID NO: 574 - DNA, 6503 bp, Homo sapiens
attactgtatatgtatgtattcagccgtgattcccaaaggttcattttatgacagcatctttctgatttcctcacagtttattatcttcccattgcccaagtttagtaactttatattagttttggcttcgtacaggcaccactcattgggagcaacacagaaatctgtttcaaaacatcatttcaggaaaaagagaatattttagcgttgaggatctttaaaagtattgcagtactttatagaactaagttgtaggagctaagaggatcttttaattcatgctatgcaattatgtattttttgttgttgttgtattttattttattttgatttgtatgactttggaagagggtatgattttaccattcaagaaaatggacttcagatagatcaacctcctgaaataggaaacatctccattgttcgcatcataataatgaaaaatgataacgcagaaggcatcattgaatttgacccaaagtatactgccttcgaagtggaggaagatgttgggctgatcatgatcccagtggtgaggctacatggaacttatggctatgtgacagctgatttcatctctcagagctcctctgccagtcccggaggtgttgattacattttgcatggcagtacagtcacctttcagcatgggcaaaacttaagttttataaatatctccatcattgatgacaatgaaagtgaatttgaggagcccattgaaattctactcactggagctactggaggagcggtccttgggcgccacctagtgagcagaatcataatagctaagagtgactctccctttggagttataaggtttctcaatcaaagcaaaatttctattgctaatcccaattccacaatgattttatcactggtgctggagcggactggaggactcttgggagagattcaggtgaactgggagacagtaggacccaactctcaagaagccttactgccacagaatagagacattgcagacccagtgagcgggttgttctattttggagaaggagaaggaggagtgagaaccataattctgacaatctatcctcatgaagaaattgaagttgaagagacattcattattaaacttcatcttgtgaaaggagaagctaaattagactccagagctaaagatgttacattaaccatacaagagtttggtgacccaaatggagttgttcagtttgctcctgaaactttgtctaagaagacttattcagagcctctggctctggaagggcccctgctcattaccttctttgtcagaagagtcaagggcacctttggagagattatggtttactgggaattaagtagtgagtttgacattactgaagactttctttccaccagtggatttttcaccattgctgatggagagagtgaagctagctttgatgttcatttgctaccagatgaggtacctgagatagaggaagattatgtgatccagcttgtttctgtagagggaggagccgaactggatctggagaagagtatcacatggttctctgtttatgcaaatgatgacccacatggagtatttgccctgtattcggatcgccagtcaatacttattgggcagaaccttattagatccatccaaattaacataacccggcttgctggaacatttggagatgtggctgttgggcttcgaatatcatcggatcataaagaacagccgattgttaccgaaaatgcagagaggcagctggtggtcaaagatggtgccacatataaagtggacgtggtgccaataaagaatcaggtcttcctatcactgggctctaatttcactttgcaactggtgactgtgatgcttgtcggtggacgtttctatggaatgccaacaattcttcaggaagcaaaatctgctgtccttccagtctctgagaaagctgccaattctcaggtcggatttgaatccactgcttttcaactcatgaacatcactgctggcacaagccacgttatgatttctaggagaggcacatatggagctctctcggttgcctggaccactggatatgctcctgggttagaaattcctgaattcattgttgttggcaacatgaccccaacactggggagcctttcattttcccacggtgaacaaaggaaaggagttttcctgtggacgtttcctagccctggttggccagaggcctttgttcttcacctatcaggagtgcagagcagtgctcctggcggagctcaactccgatcaggtttcattgttgctgaaattgaaccaatgggcgtcttccaattttccactagctcaagaaatatcatagtgtcagaagatacacagatgatcagattacatgtacaaagactatttgggttccacagcgatcttattaaagtttcttatcagaccactgcaggaagcgccaagccactggaagattttgagcctgttcagaatggggaactgttttttcaaaaattccaaactgaggttgattttgaaataaccattattaatgatcagctttctgagatagaagaatttttttacattaaccttacttcagtagaaattaggggattacaaaagtttgatgttaattggagcccacgcctgaatctagatttcagtgttgcagtgattacaatattggataatgatgacctggcaggaatggatatttccttccccgagacaactgtggctgtagcagttgacacaactctcattcctgtagaaactgaatccaccacatacctcagcacaagcaagacgactaccattctgcagccaaccaacgtggttgccattgttactgaggcaactggtgtatctgccatccctgagaaacttgtcacccttcatggcacacctgctgtgtctgaaaagcctgatgtggccactgtaactgccaatgtttccattcatggaacattcagccttgggccatccattgtttatattgaagaggagatgaagaatggcacattcaacactgcagaagttcttatccgaagaactggtgggtttactggcaatgtcagcataacagttaaaactttcggtgaaagatgtgctcagatggaaccaaatgcattgccctttcgtggtatctatgggatttccaacctaacatgggcagttgaagaagaagactttgaagaacaaactcttacccttatattcctagatggagaaagagaacgtaaagtatcagttcaaattttggatgatgatgagcctgaggggcaggaattcttctacgtgtttctcacaaaccctcaagggggagcacagattgtggaggggaaggatgatactggatttgcagcttttgccatggttattattacagggagtgaccttcacaatggcatcataggattcagtgaggagtcccagagtggactagaactcagggaaggagctgttatgagaagattgcaccttattgtcacaagacagccaaacagggcctttgaagatgtcaaggtcttttggcgagtcacacttaacaaaacagtcgtcgtgctccagaaggatggggtaaacctgatggaggaacttcagtctgtgtcagggaccacaacctgtacaatgggtcaaacaaaatgctttatcagcattgaactcaaaccagaaaaggtaccacaggttgaagtgtatttttttgtggaactatatgaagctactgctggagcagcaataaacaacagtgccagattcgcacagattaaaatcttagaaagtgatgaatctcaaagccttgtgtatttttctgtgggttctcggctggcagtggctcacaagaaggccactttaatcagtctgcaggtggccagagattctgggacaggactaatgatgtctgttaactttagtacccaggagttgaggagtgctgaaacaattggtcgtaccatcatatctccagctatttctggaaaggattttgtgataactgaaggcacattggtctttgaacctggccagagaagcactgtattggatgtcatcctaacgccagagacaggatctttaaattcatttcctaaacgcttccagattgtcctttttgacccaaaaggtggtgccagaattgataaagtgtatgggactgccaacatcactcttgtctcagatgcagattcgcaggccatttgggggcttgcagatcagctacatcagcctgtgaatgatgatattctcaacagagtgctccataccatcagcatgaaagtggccacagaaaacacagatgaacaactcagtgccatgatgcatctaatagaaaagataactactgaaggaaaaattcaagctttcagtgttgccagccgaactcttttctatgagattctttgttctcttattaacccaaagcgcaaggacactaggggattcagtcactttgctgaagtgactgagaattttgccttttctctgctgactaatgttacttgcggctctcctggtgaaaaaagcaaaaccatccttgatagttgcccatatttgtcaatattggctcttcactggtatcctcagcaaatcaatggacacaagtttgaaggaaaggaaggagattacattcgaattccagagaggctactggatgtccaggatgcagaaataatggctgggaaaagtacatgtaaattagtccagtttacagagtatagcagccaacagtggtttataagtggaaacaatcttcctaccctaaaaaataaggtattatctttgagtgtgaaaggtcagagttcacaactcctgactaatgacaatgaggttctctacaggatttatgctgctgagcctagaattattcctcagacatctctgtgtctcctttggaatcaggctgctgcaagctggttgtctgacagtcagttttgcaaagtgattgaggaaactgcagactatgtggaatgtgcctgttcacacatgtctgtgtatgctgtctatgctcggactgacaacttgtcttcatacaatgaagccttcttcacttctggatttatatgtatctcaggtctttgcttggctgttctttcccatatcttctgtgccaggtactccatgtttgcagctaaacttctgactcacatgatggcagccagcttaggtacacagattctgtttctggcgtctgcatacgcaagtccccaactcgctgaggagagctgttcagctatggctgctgtcacacattacctgtatctttgccagtttagctggatgctcattcagtctgtgaatttctggtacgtgctggtgatgaatgatgagcacacagagaggcgatatctgctgtttttccttctgagttggggactaccagcttttgtggtgattctcctcatagttattttgaaaggaatctatcatcagagcatgtcacagatctatggactcattcatggtgacctgtgttttattccaaacgtctatgctgctttgttcactgcagctcttgttcctttgacgtgcctcgtggtggtgttcgtggtgttcatccatgcctaccaggtgaagccacagtggaaagcatatgatgatgtcttcagaggaaggacaaatgctgcagaaattccactgattttatatctctttgctctgatttccgtgacatggctttggggaggactacacatggcctacagacacttctggatgttggttctctttgtcattttcaacagtctgcagggactttatgttttcatggtttatttcattttacacaaccaaatgtgttgccctatgaaggccagttacactgtggaaatgaatgggcatcctggacccagcacagcctttttcacgcccgggagtggaatgcctcctgctggaggggaaatcagcaagtccacccagaatctcatcggtgctatggaggaggtgccacctgactgggagagagcatccttccaacagggcagtcaggccagccctgatttaaagccaagtccacaaaatggagccacgttcccgtcctctggaggatatggccaggggtcactgatagccgatgaggagtcccaggagtttgatgatttaatatttgcattaaaaactggtgctggtctcagtgtcagtgataatgaatctggtcaaggcagccaggaggggggcaccttgactgactcccagatcgtggagctcaggaggatacccatcgccgacactcacctgtagcacctcactaaccattcgactgagcacactttcatatttgtatcagcttttgtgctaaaactctctaagtacatccacctgtgtaataggaacctgtgaattgtactggatgattaatacaaacgtgattgttgtatttggagtataaattactgattgtatgtgacctgaaaattcactgctataagaaaggtggagtcagtttgtatcagttaataggatgttcatattccaaggatattagttgtttttttaatcatcctatatggctaacattgtttaatgaaagtaataatcaataaagcaatagaatct

SEQ ID NO: 575 - protein, 1967 aa, Homo sapiens
MQLCIFCCCCILFYFDLYDFGRGYDFTIQENGLQIDQPPEIGNISIVRIIIMKNDNAEGIIEFDPKYTAFEVEEDVGLIMIPVVRLHGTYGYVTADFISQSSSASPGGVDYILHGSTVTFQHGQNLSFINISIIDDNESEFEEPIEILLTGATGGAVLGRHLVSRIIIAKSDSPFGVIRFLNQSKISIANPNSTMILSLVLERTGGLLGEIQVNWETVGPNSQEALLPQNRDIADPVSGLFYFGEGEGGVRTIILTIYPHEEIEVEETFIIKLHLVKGEAKLDSRAKDVTLTIQEFGDPNGVVQFAPETLSKKTYSEPLALEGPLLITFFVRRVKGTFGEIMVYWELSSEFDITEDFLSTSGFFTIADGESEASFDVHLLPDEVPEIEEDYVIQLVSVEGGAELDLEKSITWFSVYANDDPHGVFALYSDRQSILIGQNLIRSIQINITRLAGTFGDVAVGLRISSDHKEQPIVTENAERQLVVKDGATYKVDVVPIKNQVFLSLGSNFTLQLVTVMLVGGRFYGMPTILQEAKSAVLPVSEKAANSQVGFESTAFQLMNITAGTSHVMISRRGTYGALSVAWTTGYAPGLEIPEFIVVGNMTPTLGSLSFSHGEQRKGVFLWTFPSPGWPEAFVLHLSGVQSSAPGGAQLRSGFIVAEIEPMGVFQFSTSSRNIIVSEDTQMIRLHVQRLFGFHSDLIKVSYQTTAGSAKPLEDFEPVQNGELFFQKFQTEVDFEITIINDQLSEIEEFFYINLTSVEIRGLQKFDVNWSPRLNLDFSVAVITILDNDDLAGMDISFPETTVAVAVDTTLIPVETESTTYLSTSKTTTILQPTNVVAIVTEATGVSAIPEKLVTLHGTPAVSEKPDVATVTANVSIHGTFSLGPSIVYIEEEMKNGTFNTAEVLIRRTGGFTGNVSITVKTFGERCAQMEPNALPFRGIYGISNLTWAVEEEDFEEQTLTLIFLDGERERKVSVQILDDDEPEGQEFFYVFLTNPQGGAQIVEGKDDTGFAAFAMVIITGSDLHNGIIGFSEESQSGLELREGAVMRRLHLIVTRQPNRAFEDVKVFWRVTLNKTVVVLQKDGVNLMEELQSVSGTTTCTMGQTKCFISIELKPEKVPQVEVYFFVELYEATAGAAINNSARFAQIKILESDESQSLVYFSVGSRLAVAHKKATLISLQVARDSGTGLMMSVNFSTQELRSAETIGRTIISPAISGKDFVITEGTLVFEPGQRSTVLDVILTPETGSLNSFPKRFQIVLFDPKGGARIDKVYGTANITLVSDADSQAIWGLADQLHQPVNDDILNRVLHTISMKVATENTDEQLSAMMHLIEKITTEGKIQAFSVASRTLFYEILCSLINPKRKDTRGFSHFAEVTENFAFSLLTNVTCGSPGEKSKTILDSCPYLSILALHWYPQQINGHKFEGKEGDYIRIPERLLDVQDAEIMAGKSTCKLVQFTEYSSQQWFISGNNLPTLKNKVLSLSVKGQSSQLLTNDNEVLYRIYAAEPRIIPQTSLCLLWNQAAASWLSDSQFCKVIEETADYVECACSHMSVYAVYARTDNLSSYNEAFFTSGFICISGLCLAVLSHIFCARYSMFAAKLLTHMMAASLGTQILFLASAYASPQLAEESCSAMAAVTHYLYLCQFSWMLIQSVNFWYVLVMNDEHTERRYLLFFLLSWGLPAFVVILLIVILKGIYHQSMSQIYGLIHGDLCFIPNVYAALFTAALVPLTCLVVVFVVFIHAYQVKPQWKAYDDVFRGRTNAAEIPLILYLFALISVTWLWGGLHMAYRHFWMLVLFVIFNSLQGLYVFMVYFILHNQMCCPMKASYTVEMNGHPGPSTAFFTPGSGMPPAGGEISKSTQNLIGAMEEVPPDWERASFQQGSQASPDLKPSPQNGATFPSSGGYGQGSLIADEESQEFDDLIFALKTGAGLSVSDNESGQGSQEGGTLTDSQIVELRRIPIADTHL

SEQ ID NO: 576 - DNA, 921 bp, Homo sapiens
atgtattcatttatggcaggatccatattcatcacaatatttggcaatcttgccatgataatttccatttcctacttcaagcagcttcacacaccaaccaacttcctcatcctctccatggccatcactgatttcctcctgggattcaccatcatgccatatagtatgatcagatcggtggagaactgctggtattttgggcttacattttgcaagatttattatagttttgacctgatgcttagcataacatccatttttcatctttgctcagtggccattgatagattttatgctatatgttacccattactttattccaccaaaataactattccagtcattaaaagattgctacttctatgttggtcggtccctggagcatttgccttcggggcggtcttctcagaggcctatgcagatggaatagagggctatgacatcttggttgcttgttccagttcctgcccagtgatgttcaacaagctatgggggaccaccttgtttatggcaggtttcttcactcctgggtctatgatggtggggatttacggcaaaatttttgcagtatccagaaaacatgctcatgccatcaataacttgcgagaaaatcaaaataatcaagtgaagaaagacaaaaaagctgccaaaactttaggaatagtgataggagttttcttattatgttggtttccttgtttcttcacaattttattggatccctttttgaacttctctactcctgtagttttgtttgatgccttgacatggtttggctattttaactccacatgtaatccgttaatatatggtttcttctatccctggtttcgcagagcactgaagtacattttgctaggtaaaattttcagctcatgtttccataatactattttgtgtatgcaaaaagaaagtgagtag

SEQ ID NO: 577 - protein, 306 aa, Homo sapiens
MYSFMAGSIFITIFGNLAMIISISYFKQLHTPTNFLILSMAITDFLLGFTIMPYSMIRSVENCWYFGLTFCKIYYSFDLMLSITSIFHLCSVAIDRFYAICYPLLYSTKITIPVIKRLLLLCWSVPGAFAFGAVFSEAYADGIEGYDILVACSSSCPVMFNKLWGTTLFMAGFFTPGSMMVGIYGKIFAVSRKHAHAINNLRENQNNQVKKDKKAAKTLGIVIGVFLLCWFPCFFTILLDPFLNFSTPVVLFDALTWFGYFNSTCNPLIYGFFYPWFRRALKYILLGKIFSSCFHNTILCMQKESE

SEQ ID NO: 578 - DNA, 1032 bp, Homo sapiens
atggatctaacttatattcccgaagacctatccagttgtccaaaatttgtaaataagatcctgtcctcccaccaaccgctcttttcatgtccaggtgataatgtattcggttatgactggagccatgattatccactattcggaaacttggttataatggtttccatatcgcatttcaaacagcttcactctcccacaaactttctgatcctctccatggcaaccacggactttctgctgggttttgtcattatgccatacagcataatgcgatcagtggagagttgctggtactttggggatggcttttgtaaattccacacaagctttgacatgatgctcagactgacctccattttccacctctgttccattgctattgaccgattttatgccgtgtgttaccctttacattacacaaccaaaatgacgaactccaccataaagcaactgctggcattttgctggtcagttcctgctcttttttcttttggtttagttctatctgaggccgatgtttccggtatgcagagctataagatacttgttgcttgcttcaatttctgtgcccttactttcaacaaattctgggggacaatattgttcactacatgtttctttacccctggctccatcatggttggtatttatggcaaaatctttatcgtttccaaacagcatgctcgagtcatcagccatgtgcctgaaaacacaaagggggcagtgaaaaaacacctatccaagaaaaaggacaggaaagcagcgaagacactgggtatagtaatgggggtgtttctggcttgctggttgccttgttttcttgctgttctgattgacccatacctagactactccactcccatactaatattggatcttttagtgtggctccggtacttcaactctacttgcaaccctcttattcatggcttttttaatccatggtttcagaaagcattcaagtacatagtgtcaggaaaaatatttagctcccattcagaaactgcaaatttgtttcctgaagcacattaa

SEQ ID NO: 579 - protein, 343 aa, Homo sapiens
MDLTYIPEDLSSCPKFVNKILSSHQPLFSCPGDNVFGYDWSHDYPLFGNLVIMVSISHFKQLHSPTNFLILSMATTDFLLGFVIMPYSIMRSVESCWYFGDGFCKFHTSFDMMLRLTSIFHLCSIAIDRFYAVCYPLHYTTKMTNSTIKQLLAFCWSVPALFSFGLVLSEADVSGMQSYKILVACFNFCALTFNKFWGTILFTTCFFTPGSIMVGIYGKIFIVSKQHARVISHVPENTKGAVKKHLSKKKDRKAAKTLGIVMGVFLACWLPCFLAVLIDPYLDYSTPILILDLLVWLRYFNSTCNPLIHGFFNPWFQKAFKYIVSGKIFSSHSETANLFPEAH

SEQ ID NO: 580 - DNA, 3119 bp, Homo sapiens
gccactgccaggaggacggcatcatgctgtctgccgactgctctgagctcgggctgtccgccgttccgggggacctggaccccctgacggcttacctggacctcagcatgaacaacctcacagagcttcagcctggcctcttccaccacctgcgcttcttggaggagctgcgtctctctgggaaccatctctcacacatcccaggacaagcattctctggtctctacagcctgaaaatcctgatgctgcagaacaatcagctgggaggaatccccgcagaggcgctgtgggagctgccgagcctgcagtcgctgcgcctagatgccaacctcatctccctggtcccggagaggagctttgaggggctgtcctccctccgccacctctggctggacgacaatgcactcacggagatccctgtcagggccctcaacaacctccctgccctgcaggccatgaccctggccctcaaccgcatcagccacatccccgactacgcgttccagaatctcaccagccttgtggtgctgcatttgcataacaaccgcatccagcatctggggacccacagcttcgaggggctgcacaatctggagacactagacctgaattataacaagctgcaggagttccctgtggccatccggaccctgggcagactgcaggaactggggttccataacaacaacatcaaggccatcccagaaaaggccttcatggggaaccctctgctacagacgatacacttttatgataacccaatccagtttgtgggaagatcggcattccagtacctgcctaaactccacacactatctctgaatggtgccatggacatccaggagtttccagatctcaaaggcaccaccagcctggagatcctgaccctgacccgcgcaggcatccggctgctcccatcggggatgtgccaacagctgcccaggctccgagtcctggaactgtctcacaatcaaattgaggagctgcccagcctgcacaggtgtcagaaattggaggaaatcggcctccaacacaaccgcatctgggaaattggagctgacaccttcagccagctgagctccctgcaagccctggatcttagctggaacgccatccggtccatccaccctgaggccttctccaccctgcactccctggtcaagctggacctgacagacaaccagctgaccacactgcccctggctggacttgggggcttgatgcatctgaagctcaaagggaaccttgctctctcccaggccttctccaaggacagtttcccaaaactgaggatcctggaggtgccttatgcctaccagtgctgtccctatgggatgtgtgccagcttcttcaaggcctctgggcagtgggaggctgaagaccttcaccttgatgatgaggagtcttcaaaaaggcccctgggcctccttgccagacaagcagagaaccactatgaccaggacctggatgagctccagctggagatggaggactcaaagccacaccccagtgtccagtgtagccctactccaggccccttcaagccctgtgagtacctctttgaaagctggggcatccgcctggccgtgtgggccatcgtgttgctctccgtgctctgcaatggactggtgctgctgaccgtgttcgctggcgggcctgcccccctgcccccggtcaagtttgtggtaggtgcgattgcaggcgccaacaccttgactggcatttcctgtggccttctagcctcagtcgatgccctgacctttggtcagttctctgagtacggagcccgctgggagacggggctaggctgccgggccactggcttcctggcagtacttgggtcggaggcatcggtgctgctgctcactctggccgcagtgcagtgcagcgtctccgtctcctgtgtccgggcctatgggaagtccccctccctgggcagcgttcgagcaggggtcctaggctgcctggcactggcagggctggccgccgcactgcccctggcctcagtgggagaatacggggcctccccactctgcctgccctacgcgccacctgagggtcagccagcagccctgggcttcaccgtggccctggtgatgatgaactccttctgtttcctggtcgtggccggtgcctacatcaaactgtactgtgacctgccgcggggcgactttgaggccgtgtgggactgcgccatggtgaggcacgtggcctggctcatcttcgcagacgggctcctctactgtcccgtggccttcctcagctttgcctccatgctgggcctcttccctgtcacgcccgaggccgtcaagtctgtcctgctggtggtgctgcccctgcctgcctgcctcaacccactgctgtacctgctcttcaacccccacttccgggatgaccttcggcggcttcggccccgcgcaggggactcagggcccctagcctatgctgcggccggggagctggagaagagctcctgtgattctacccaggccctggtagccttctctgatgtggatctcattctggaagcttctgaagctgggcggccccctgggctggagacctatggcttcccctcagtgaccctcatctcctgtcagcagccaggggcccccaggctggagggcagccattgtgtagagccagaggggaaccactttgggaacccccaaccctccatggatggagaactgctgctgagggcagagggatctacgccagcaggtggaggcttgtcagggggtggcggctttcagccctctggcttggcctttgcttcacacgtgtaaatatccctccccattcttctcttcccctctcttccctttcctctctccccctcggtgaatgatggctgcttctaaaacaaatacaaccaaaactcagcagtgtgatctatagcaggatggcccagtacctggctccactgatcacctctctcctgtgaccatcaccaacgggtgcctcttggcctggctttcccttggccttcctcagcttcaccttgatactgggcctcttccttgtcatgtctgaagctgtggaccagagacctggacttttgtctgcttaagggaaatgagggaagtaaagacagtgaaggggtggagggttgatca

SEQ ID NO: 581 - protein, 828 aa, Homo sapiens
MRLEGEGRSARAGQNLSRAGSARRGAPRDLSMNNLTELQPGLFHHLRFLEELRLSGNHLSHIPGQAFSGLYSLKILMLQNNQLGGIPAEALWELPSLQSLDLNYNKLQEFPVAIRTLGRLQELGFHNNNIKAIPEKAFMGNPLLQTIHFYDNPIQFVGRSAFQYLPKLHTLSLNGAMDIQEFPDLKGTTSLEILTLTRAGIRLLPSGMCQQLPRLRVLELSHNQIEELPSLHRCQKLEEIGLQHNRIWEIGADTFSQLSSLQALDLSWNAIRSIHPEAFSTLHSLVKLDLTDNQLTTLPLAGLGGLMHLKLKGNLALSQAFSKDSFPKLRILEVPYAYQCCPYGMCASFFKASGQWEAEDLHLDDEESSKRPLGLLARQAENHYDQDLDELQLEMEDSKPHPSVQCSPTPGPFKPCEYLFESWGIRLAVWAIVLLSVLCNGLVLLTVFAGGPVPLPPVKFVVGAIAGANTLTGISCGLLASVDALTFGQFSEYGARWETGLGCRATGFLAVLGSEASVLLLTLAAVQCSVSVSCVRAYGKSPSLGSVRAGVLGCLALAGLAAALPLASVGEYGASPLCLPYAPPEGQPAALGFTVALVMMNSFCFLVVAGAYIKLYCDLPRGDFEAVWDCAMVRHVAWLIFADGLLYCPVAFLSFASMLGLFPVTPEAVKSVLLVVLPLPACLNPLLYLLFNPHFRDDLRRLRPRAGDSGPLAYAAAGELEKSSCDSTQALVAFSDVDLILEASEAGRPPGLETYGFPSVTLISCQQPGAPRLEGSHCVEPEGNHFGNPQPSMDGELLLRAEGSTPAGGGLSGGGGFQPSGLALLHTY

SEQ ID NO: 582 - DNA, 1527 bp, Homo sapiens
atgacgtccacctgcaccaacagcacgcgcgagagtaacagcagccacacgtgcatgcccctctccaaaatgcccatcagcctggcccacggcatcatccgctcaaccgtgctggttatcttcctcgccgcctctttcgtcggcaacatagtgctggcgctagtgttgcagcgcaagccgcagctgctgcaggtgaccaaccgttttatctttaacctcctcgtcaccgacctgctgcagatttcgctcgtggccccctgggtggtggccacctctgtgcctctcttctggcccctcaacagccacttctgcacggccctggttagcctcacccacctgttcgccttcgccagcgtcaacaccattgtcgtggtgtcagtggatcgctacttgtccatcatccaccctctctcctacccgtccaagatgacccagcgccgcggttacctgctcctctatggcacctggattgtggccatcctgcagagcactcctccactctacggctggggccaggctgcctttgatgagcgcaatgctctctgctccatgatctggggggccagccccagctacactattctcagcgtggtgtccttcatcgtcattccactgattgtcatgattgcctgctactccgtggtgttctgtgcagcccggaggcagcatgctctgctgtacaatgtcaagagacacagcttggaagtgcgagtcaaggactgtgtggagaatgaggatgaagagggagcagagaagaaggaggagttccaggatgagagtgagtttcgccgccagcatgaaggtgaggtcaaggccaaggagggcagaatggaagccaaggacggcagcctgaaggccaaggaaggaagcacggggaccagtgagagtagtgtagaggccaggggcagcgaggaggtcagagagagcagcacggtggccagcgacggcagcatggagggtaaggaaggcagcaccaaagttgaggagaacagcatgaaggcagacaagggtcgcacagaggtcaaccagtgcagcattgacttgggtgaagatgacatggagtttggtgaagacgacatcaatttcagtgaggatgacgtcgaggcagtgaacatcccggagagcctcccacccagtcgtcgtaacagcaacagcaaccctcctctgcccaggtgctaccagtgcaaagctgctaaagtgatcttcatcatcattttctcctatgtgctatccctggggccctactgctttttagcagtcctggccgtgtgggtggatgtcgaaacccaggtaccccagtgggtgatcaccataatcatctggcttttcttcctgcagtgctgcatccacccctatgtctatggctacatgcacaagaccattaagaaggaaatccaggacatgctgaagaagttcttctgcaaggaaaagcccccgaaagaagatagccacccagacctgcccggaacagagggtgggactgaaggcaagattgtcccttcctacgattctgctacttttccttga

SEQ ID NO: 583 - protein, 508 aa, Homo sapiens
MTSTCTNSTRESNSSHTCMPLSKMPISLAHGIIRSTVLVIFLAASFVGNIVLALVLQRKPQLLQVTNRFIFNLLVTDLLQISLVAPWVVATSVPLFWPLNSHFCTALVSLTHLFAFASVNTIVLVSVDRYLSIIHPLSYPSKMTQRRGYLLLYGTWIVAILQSTPPLYGWGQAAFDERNALCSMIWGASPSYTILSVVSFIVIPLIVMIACYSVVFCAARRQHALLYNVKRHSLEVRVKDCVENEDEEGAEKKEEFQDESEFRRQHEGEVKAKEGRMEAKDGSLKAKEGSTGTSESSVEARGSEEVRESSTVASDGSMEGKEGSTKVEENSMKADKGRTEVNQCSIDLGEDGMEFGEDDINFSEDDVEAVNIPESLPPSRRNSNSNPPLPRCYQCKAAKVIFIIIFSYVLSLGPYCFLAVLAVWVDVETQVPQWVITIIIWLFFLQCCIHPYVYGYMHKTIKKEIQDMLKKFFCKEKPPKEDSHPDLPGTEGGTEGKIVPSYDSATFP

SEQ ID NO: 584 - DNA, 1546 bp, Homo sapiens
taactgtccaccagaaaggactgctctttgggtgagttgaacttcttccattatagaaagaattgaaggctgagaaactcagcctctatcatgtggaacagctctgacgccaacttctcctgctaccatgagtctgtgctgggctatcgttatgttgcagttagctggggggtggtggtggctgtgacaggcaccgtgggcaatgtgctcaccctactggccttggccatccagcccaagctccgtacccgattcaacctgctcatagccaacctcacactggctgatctcctctactgcacgctccttcagcccttctctgtggacacctacctccacctgcactggcgcaccggtgccaccttctgcagggtatttgggctcctcctttttgcctccaattctgtctccatcctgaccctctgcctcatcgcactgggacgctacctcctcattgcccaccctaagctttttccccaagttttcagtgccaaggggatagtgctggcactggtgagcacctgggttgtgggcgtggccagctttgctcccctctggcctatttatatcctggtacctgtagtctgcacctgcagctttgaccgcatccgaggccggccttacaccaccatcctcatgggcatctactttgtgcttgggctcagcagtgttggcatcttctattgcctcatccaccgccaggtcaaacgagcagcacaggcactggaccaatacaagttgcgacaggcaagcatccactccaaccatgtggccaggactgatgaggccatgcctggtcgtttccaggagctggacagcaggttagcatcaggaggacccagtgaggggatttcatctgagccagtcagtgctgccaccacccagaccctggaaggggactcatcagaagtgggagaccagatcaacagcaagagagctaagcagatggcagagaaaagccctccagaagcatctgccaaagcccagccaattaaaggagccagaagagctccggattcttcatcggaatttgggaaggtgactcgaatgtgttttgctgtgttcctctgctttgccctgagctacatccccttcttgctgctcaacattctggatgccagagtccaggctccccgggtggtccacatgcttgctgccaacctcacctggctcaatggttgcatcaaccctgtgctctatgcagccatgaaccgccaattccgccaagcatatggctccattttaaaaagagggccccggagtttccataggctccattagaactgtgaccctagtcaccagaattcaggactgtctcctccaggaccaaagtggccaggtaataggagaataggtgaaataacacatgtgggcattttcacaacaatctctccccagcctcccaaatcaagtctctccatcacttgatcaatgtttcagccctagactgcccaaggagtattattaattattaataaatgaattctgtgcttttaaaaaaaaaaaaataaaaaaagaaaaaaaaaaaaaaaaaaaaaaaaaaaaa

SEQ ID NO: 585 - protein, 396 aa, Homo sapiens
MWNSSDANFSCYHESVLGYRYVAVSWGVVVAVTGTVGNVLTLLALAIQPKLRTRFNLLIANLTLADLLYCTLLQPFSVDTYLHLHWRTGATFCRVFGLLLFASNSVSILTLCLIALGRYLLIAHPKLFPQVFSAKGIVLALVSTWVVGVASFAPLWPIYILVPVVCTCSFDRIRGRPYTTILMGIYFVLGLSSVGIFYCLIHRQVKRAAQALDQYKLRQASIHSNHVARTDEAMPGRFQELDSRLASGGPSEGISSEPVSAATTQTLEGDSSEVGDQINSKRAKQMAEKSPPEASAKAQPIKGARRAPDSSSEFGKVTRMCFAVFLCFALSYIPFLLLNILDARVQAPRVVHMLAANLTWLNGCINPVLYAAMNRQFRQAYGSILKRGPRSFHRLH

SEQ ID NO: 586 - DNA, 795 bp, Homo sapiens
ctttgcttcagagctaaaccagtttttcttctctccacagcaaatatcttgacagtgatcatcctctcccagctggtggcaagaagacagaagtcctcctacaactatctcttggcactcgctgctgccgacatcttggtcctctttttcatagtgtttgtggacttcctgttggaagatttcatcttgaacatgcagatgcctcaggtccccgacaagatcatagaagtgctggaattctcatccatccacacctccatatggattactgtaccgttaaccattgacaggtatatcgctgtctgccacccgctcaagtaccacacggtctcatacccagcccgcacccggaaagtcattgtaagtgtttacatcacctgcttcctgaccagcatcccctattactggtggcccaacatctggactgaagactacatcagcacctctgtgcatcacgtcctcatctggatccactgcttcaccgtctacctggtgccctgctccatcttcttcatcttgaactcaatcattgtgtacaagctcaggaggaagagcaattttcgtctccgtggctactccacggggaagaccaccgccatcttgttcaccattacctccatctttgccacactttgggccccccgcatcatcatgattctttaccacctctatggggcgcccatccagaaccgctggctggtgcacatcatgtccgacattgccaacatgctagcccttctgaacacagccatcaacttcttcctctactgcttcatcagcaagcggttccgcacc

SEQ ID NO: 587 - protein, 265 aa, Homo sapiens
LCFRAKPVFLLSTANILTVIILSQLVARRQKSSYNYLLALAAADILVLFFIVFVDFLLEDFILNMQMPQVPDKIIEVLEFSSIHTSIWITVPLTIDRYIAVCHPLKYHTVSYPARTRKVIVSVYITCFLTSIPYYWWPNIWTEDYISTSVHHVLIWIHCFTVYLVPCSIFFILNSIIVYKLRRKSNFRLRGYSTGKTTAILFTITSIFATLWAPRIIMILYHLYGAPIQNRWLVHIMSDIANMLALLNTAINFFLYCFISKRFRT

SEQ ID NO: 588 - DNA, 2807 bp, Homo sapiens
aagttctctaagtttgaagcgtcagcttcaaccaaacaaattaatggctattctacattcaaaaatcaggaaatttaaatttattatgaaatgtaatgcagcatgtagtaaagacttaaccagtgttttaaaactcaactttcaaagaaaagatagtattgctccctgtttcattaaaacctagagagatgtaatcagtaagcaagaaggaaaaagggaaattcacaaagtaactttttgtgtctgtttctttttaacccagcatggagagaaaatttatgtccttgcaaccatccatctccgtatcagaaatggaaccaaatggcaccttcagcaataacaacagcaggaactgcacaattgaaaacttcaagagagaatttttcccaattgtatatctgataatatttttctggggagtcttgggaaatgggttgtccatatatgttttcctgcagccttataagaagtccacatctgtgaacgttttcatgctaaatctggccatttcagatctcctgttcataagcacgcttcccttcagggctgactattatcttagaggctccaattggatatttggagacctggcctgcaggattatgtcttattccttgtatgtcaacatgtacagcagtatttatttcctgaccgtgctgagtgttgtgcgtttcctggcaatggttcacccctttcggcttctgcatgtcaccagcatcaggagtgcctggatcctctgtgggatcatatggatccttatcatggcttcctcaataatgctcctggacagtggctctgagcagaacggcagtgtcacatcatgcttagagctgaatctctataaaattgctaagctgcagaccatgaactatattgccttggtggtgggctgcctgctgccatttttcacactcagcatctgttatctgctgatcattcgggttctgttaaaagtggaggtcccagaatcggggctgcgggtttctcacaggaaggcactgaccaccatcatcatcaccttgatcatcttcttcttgtgtttcctgccctatcacacactgaggaccgtccacttgacgacatggaaagtgggtttatgcaaagacagactgcataaagctttggttatcacactggccttggcagcagccaatgcctgcttcaatcctctgctctattactttgctggggagaattttaaggacagactaaagtctgcactcagaaaaggccatccacagaaggcaaagacaaagtgtgttttccctgttagtgtgtggttgagaaaggaaacaagagtataaggagctcttagatgagacctgttcttgtatccttgtgtccatcttcattcactcatagtctccaaatgactttgtatttacatcactcccaacaaatgttgattcttaatatttagttgaccattacttttgttaataagacctacttcaaaaattttattcagtgtattttcagttgttgagtcttaatgagggatacaggaggaaaaatccctactagagtcctgtgggctgaaatatcagactgggaaaaaatgcaaagcacattggatcctacttttcttcagatattgaaccagatctctggcccatcaggctttctaaattcttcaaaagagccacaacttccccagcttctccagctcccctgtcctcttcaatcccttgagatatagcaactaacgacgctactggaagccccagagcagaaaagaagcacatcctaagattcagggaaagactaactgtgaaaaggaaggctgtcctataacaaagcagcatcaagtcccaagtaaggacagtgagagaaaagggggagaaggattggagcaaaagagaactggcaataagtaggggaaggaagaatttcattttgcattgggagagaggttctaacacactgaaggcaaccctatttctactgtttctctcttgccagggtattaggaaggacaggaaaagtaggaggaggatctggggcattgccctaggaaatgaaagaattgtgtatagaatggaagggggatcatcaaggacatgtatctcaaattttctttgagatgcaggttagttgaccttgctgcagttctccttcccattaattcattgggatggaagccaaaaataaaagaggtgcctctgaggattagggttgagcactcaagggaaagatggagtagagggcaaatagcaaaagttgttgcactcctgaaattctattaacatttccgcagaagatgagtagggagatgctgccttcccttttgagatagtgtagaaaaacactagatagtgtgagaggttcctttctgtccattgaaacaaggctaaggatactaccaactactatcaccatgaccattgtactgacaacaattgaatgcagtctccctgcagggcagattatgccaggcactttacatttgttgatcccatttgacattcacaccaaagctctgagttccattttacagctgaagaaattgaagcttagagaaattaagaagcttgtttaagtttacacagctagtaagagttttaaaaatctctgtgcagaagtgttggctgggtgctctccccaccactacccttgtaaacttccaggaagattggttgaaagtctgaataaaagctgtcctttcctaccaatttcctccccctcctcactctcacaagaaaaccaaaagtttctcttcagagttgttgactcatagtacagtaaagggtggaggtgatatggcattctgaaagtagggagggactaagtcagtcgtcatactaaac

SEQ ID NO: 589 - protein, 346 aa, Homo sapiens
MERKFMSLQPSISVSEMEPNGTFSNNNSRNCTIENFKREFFPIVYLIIFFWGVLGNGLSIYVFLQPYKKSTSVNVFMLNLAISDLLFISTLPFRADYYLRGSNWIFGDLACRIMSYSLYVNMYSSIYFLTVLSVVRFLAMVHPFRLLHVTSIRSAWILCGIIWILIMASSIMLLDSGSEQNGSVTSCLELNLYKIAKLQTMNYIALVVGCLLPFFTLSICYLLIIRVLLKVEVPESGLRVSHRKALTTIIITLIIFFLCFLPYHTLRTVHLTTWKVGLCKDRLHKALVITLALAAANACFNPLLYYFAGENFKDRLKSALRKGHPQKAKTKCVFPVSVWLRKETRV

SEQ ID NO: 590 - DNA, 1287 bp, Homo sapiens
cctgtgtgccacgtgctggacaaatcttaactcctcaaggactcccaaaaccagagacaccaggagcctgaatggggaacgattctgtcagctacgagtatggggattacagcgacctctcggaccgccctgtggactgcctggatggcgcctgcctggccatcgacccgctgcgcgtggccccgctcccactgtatgccgccatcttcctggtgggggtgccgggcaatgccatggtggcctgggtggctgggaaggtggcccgccggagggtgggtgccacctggttgctccacctggccgtggcggatttgctgtgctgtttgtctctgcccatcctggcagtgcccattgcccgtggaggccactggccgtatggtgcagtgggctgtcgggcgctgccctccatcatcctgctgaccatgtatgccagcgtcctgctcctggcagctctcagtgccgacctctgcttcctggctctcgggcctgcctggtggtctacggttcagcgggcgtgcggggtgcaggtggcctgtggggcagcctggacactggccttgctgctcaccgtgccctccgccatctaccgccggctgcaccaggagcacttcccagcccggctgcagtgtgtggtggactacggcggctcctccagcaccgagaatgcggtgactgccatccggtttctttttggcttcctggggcccctggtggccgtggccagctgccacagtgccctcctgtgctgggcagcccgacgctgccggccgctgggcacagccattgtggtggggttttttgtctgctgggcaccctaccacctgctggggctggtgctcactgtggcggccccgaactccgcactcctggccagggccctgcgggctgaacccctcatcgtgggccttgccctcgctcacagctgcctcaatcccatgctcttcctgtattttgggagggctcaactccgccggtcactgccagctgcctgtcactgggccctgagggagtcccagggccaggacgaaagtgtggacagcaagaaatccaccagccatgacctggtctcggagatggaggtgtaggctggagagacattgtgggtgtgtatcttcttatctcatttcacaagactggcttcaggcatagctggatccaggagctcaatgatgtcttcattttattccttccttcattcaacagatatccatcatgcacttgctatgtgcaaggcctttttaggcactagagatatagcagtgaccaaaacagacacaaatcctgccc

SEQ ID NO: 591 - protein, 337 aa, Homo sapiens [sequence omitted]

SEQ ID NO: 592 - DNA, 3115 bp, Homo sapiens
atgctgggccctgctgtcctgggcctcagcctctgggctctcctgcaccctgggacgggggccccattgtgcctgtcacagcaacttaggatgaagggggactacgtgctgggggggctgttccccctgggcgaggccgaggaggctggcctccgcagccggacacggcccagcagccctgtgtgcaccaggtacagaggtgggacggcctgggtcggggtcagggtgaccaggtctggggtgctcctgagctggggccgaggtggccatctgcggttctgtgtggccccaggttctcctcaaacggcctgctctgggcactggccatgaaaatggccgtggaggagatcaacaacaagtcggatctgctgcccgggctgcgcctgggctacgacctctttgatacgtgctcggagcctgtggtggccatgaagcccagcctcatgttcctggccaaggcaggcagccgcgacatcgccgcctactgcaactacacgcagtaccagccccgtgtgctggctgtcatcgggccccactcgtcagagctcgccatggtcaccggcaagttcttcagcttcttcctcatgccccaggtggcgccccccaccatcacccacccccacccagccctgcccgtgggagcccctgtgtcaggagatgcctcttggcccttgcaggtcagctacggtgctagcatggagctgctgagcgcccgggagaccttcccctccttcttccgcaccgtgcccagcgaccgtgtgcagctgacggccgccgcggagctgctgcaggagttcggctggaactgggtggccgccctgggcagcgacgacgagtacggccggcagggcctgagcatcttctcggccctggctcggcacgcggcatctgcatcgcgcacgagggcctggtgccgctgccccgtgccgatgactcgcggctggggaaggtgcaggacgtcctgcaccaggtgaaccagagcagcgtgcaggtggtgctgctgttcgcctccgtgcacgccgcccacgccctcttcaactacagcatcagcagcaggctctcgcccaaggtgtgggtggccagcgaggcctggctgacctctgacctggtcatggggctgcccggcatggcccagatgggcacggtgcttggcttcctccagaggggtgcccagctgcacgagttcccccagtacgtgaagacgcacctggccctggccaccgacccggccttctgctctgccctgggcgagagggagcagggtctggaggaggacgtggtgggccagcgctgcccgcagtgtgactgcatcacgctgcagaacgtgagcgcagggctaaatcaccaccagacgttctctgtctacgcagctgtgtatagcgtgcccaggccctgcacaacactcttcagtgcaacgcctcaggctgccccgcgcaggaccccgtgaagccctggcaggtgagcccgggagatgggggtgtgctgtcctctgcatgtgcccaggccaccaggcacggccaccacgcctgagctggaggtggctggcggctcagccccgtcccccgcccgcagctcctggagaacatgtacaacctgaccttccacgtgggcgggctgccgctgcggttcgacagcagcggaaacgtggacatggagtacgacctgaagctgtgggtgtggcagggctcagtgcccaggctccacgacgtgggcaggttcaacggcagcctcaggacagagcgcctgaagatccgctggcacacgtctgacaaccaggtgaggtgagggtgggtgtgccaggcgtgcccgtggtagcccccgcggcagggcgcagcctgggggtgggggccgttccagtctcccgtggcatgcccagccgagcagagccagaccccaggcctgtgcgcagaagcccgtgtcccggtgctcgcggcagtgccaggagggccaggtgcgccgggtcaaggggttccactcctgctgctacgactgtgtggactgcgaggcgggcagctaccggcaaaacccaggtgagccgccttcccggcaggcgggggtgggaacgcagcaggggagggtcctgccaagtcctgactctgagaccagagcccacaggggacaagacgaacacccagcgcccttctcctctctcacagacgacatcgcctgcaccttttgtggccaggatgagtggtccccggagcgaagcacacgctgcttccgccgcaggtctcggttcctggcatggggcgagccggctgtgctgctgctgctcctgctgctgagcctggcgctgggccttgtgctggctgctttggggctgttcgttcaccatcgggacagcccactggttcaggcctcgggggggcccctggcctgctttggcctggtgtgcctgggcctggtctgcctcagcgtcctcctgttccctggccagcccagccctgcccgatgcctggcccagcagcccttgtcccacctcccgctcacgggctgcctgagcacactcttcctgcaggcggccgagatcttcgtggagtcagaactgcctctgagctgggcagaccggctgagtggctgcctgcgggggccctgggcctggctggtggtgctgctggccatgctggtggaggtcgcactgtgcacctggtacctggtggccttcccgccggaggtggtgacggactggcacatgctgcccacggaggcgctggtgcactgccgcacacgctcctgggtcagcttcggcctagcgcacgccaccaatgccacgctggcctttctctgcttcctgggcactttcctggtgcggagccagccgggccgctacaaccgtgcccgtggcctcacctttgccatgctggcctacttcatcacctgggtctcctttgtgcccctcctggccaatgtgcaggtggtcctcaggcccgccgtgcagatgggcgccctcctgctctgtgtcctgggcatcctggctgccttccacctgcccaggtgttacctgctcatgcggcagccagggctcaacacccccgagttcttcctgggagggggccctggggatgcccaaggccagaatgacgggaacacaggaaatcaggggaaacatgagtga

SEQ ID NO: 593 - protein, 771 aa, Homo sapiens
FSSNGLLWALAMKMAVEEINNKSDLLPGLRLGYDLFDTCSEPVVAMKPSLMFLAKAGSRDIAAYCNYTQYQPRVLAVIGPHSSELAMVTGKFFSFFLMPQVSYGASMELLSARETFPSFFRTVPSDRVQLTAAAELLQEFGWNWVAALGSDDEYGRQGLSIFSALAARGICIAHEGLVPLPRADDSRLGKVQDVLHQVNQSSVQVVLLFASVHAAHALFNYSISSRLSPKVWVASEAWLTSDLVMGLPGMAQMGTVLGFLQRGAQLHEFPQYVKTHLALATDPAFCSALGEREQGLEEDVVGQRCPQCDCITLQNVSAGLNHHQTFSVYAAVYSVQALHNTLQCNASGCPAQDPVKPWQLLENMYNLTFHVGGLPLRFDSSGNVDMEYDLKLWVWQGSVPRLHDVGRFNGSLRTERLKIRWHTSDNQVRPQACAQKPVSRCSRQCQEGQVRRVKGFHSCCYDCVDCEAGSYRQNPDDIACTFCGQDEWSPERSTRCFRRRSRFLAWGEPAVLLLLLLLSLALGLVLAALGLFVHHRDSPLVQASGGPLACFGLVCLGLVCLSVLLFPGQPSPARCLAQQPLSHLPLTGCLSTLFLQAAEIFVESELPLSWADRLSGCLRGPWAWLVVLLAMLVEVALCTWYLVAFPPEVVTDWHMLPTEALVHCRTRSWVSFGLAHATNATLAFLCFLGTFLVRSQPGRYNRARGLTFAMLAYFITWVSFVPLLANVQVVLRPAVQMGALLLCVLGILAAFHLPRCYLLMRQPGLNTPEFF

SEQ ID NO: 594 - DNA, 1697 bp, Homo sapiens
tctgactggctggttcctctgtctgccctgggctctttcactgctctggtgggcctgcgtgttcctggaccctcacgtggggcctgcgcccggggccgcctctggcggggtgctgctggggctttctccttcagaggcaggaggtgtggctgggtcctcaagggcccctggggtaggatgcgaggatggggttggggaagcttcatcacagggactgggcacagaactggcagcaggtgcaggggtctggacgttagtgtctgcctgtggctgggccacagaatctgactgtggctgggccatgaggttcagctgtggctgggctgtgggatccgactgtggctgggccgtagggttcagctgtggctgagctgtgggatccgatcgtggctggagtgtggggttcacctgaggctgggccacaggatccatctgtgactgggcctctgccatcggctctggcagagttggaccctcagaatctagctgggtctgtggctcagtgggcgtgaagctgcccggccgctcctcgcagagagctgccgcgaaggacgagagcacggagcgcagcagggtccggaggtcggcactggccatgaggcagaggaaggggctgaggcagctgttgagtaggatcaggtagtcggagtagaccagggcctcccagagcaggtagccagagtagacgtcccacaggaaggccaggtagagcagctgggccagctggtagggcagcctcaggaccacataggctgacagaatggtcctggccacacgggcgaagccccggcaggctgcgggctgctgttggcggtggcaggtgcgacaggctgtggcctgggtgagcacgtggcagacgagcagcaggaggaaaggcaggaagccccccaggacctccagcatcctcagcgacagctcctcgctgtcccagaagtccaggcagatgaccaggtcgtaccaccagacggcagcctcggggaagaccagccagggcacgctgaagagtgtggccagcacccagacaccggcgcagacccagaggggcaggcggactgggcggtgcccagggtaccagtgtgggcacagcgccagcaggcagcggtcgaggctgagggcggccagcaggaagaggccggaggagtaggacacgccccataggaagtagtagaagcggcaggcagctgtccccagcggccagtgtcccccatgccggatctctaggatctggaaggccgctgctgccaggaacaagaagtcagagagggccaggctgagcaggagcagcgccagacgcgtgccagctccatgccgggcctgggagccggccagccacgccatcaacccattggctggcagcccaaggagcagcagggccaccaggaagaccgtgtcccagccaccttgggggtaggagtcctcatcatcaagctctgtgcggggcctgtggccagtggcacccaggtcagcttccatggtagtgtccatttggggtccccagagtcctgctggacacggagtgggtgcctggtgaatcaatgatggtgtgaatgaccgagtatgggagagacggtgctgtgcatctccaggcaagtcaccatccctccctgcgccattgtcatcaccttttgagtaattatcctatgccaaggacttgaagtggatgacctcatggagtcctcatacaatctactttacag

SEQ ID NO: 595 - protein, 465 aa, Homo sapiens
MEADLGATGHRPRTELDDEDSYPQGGWDTVFLVALLLLGLPANGLMAWLAGSQARHGAGTRLALLLLSLALSDFLFLAAAAFQILEIRHGGHWPLGTAACRFYYFLWGVSYSSGLFLLAALSLDRCLLALCPHWYPGHRPVRLPLWVCAGVWVLATLFSVPWLVFPEAAVWWYDLVICLDFWDSEELSLRMLEVLGGFLPFLLLLVCHVLTQATACRTCHRQQQPAACRGFARVARTILSAYVVLRLPYQLAQLLYLAFLWDVYSGYLLWEALVYSDYLILLNSCLSPFLCLMASADLRTLLRSVLSSFAAALCEERPGSFTPTEPQTQLDSEGPTLPEPMAEAQSQMDPVAQPQVNPTLQPRSDPTAQPQLNPTAQPQSDPTAQPQLNLMAQPQSDSVAQPQADTNVQTPAPAASSVPSPCDEASPTPSSHPTPGALEDPATPPASEGESPSSTPPEAAPGAGP

SEQ ID NO: 596 - DNA, 1891 bp, Homo sapiens
agcacctgggaaaaggcagaccgtgtgagggggcctgtggccccagcgtgctgtggcctcggggagtgggaagtggaggcaggagccttccttacacttcgccatgagtttcctgatcgactccagcatcatgattacctcccaaatactattttttggatttgggtggcttttcttcatgcgccaattgtttaaagactatgagatacgtcagtatgttgtacaggtgatcttctccgtgacgtttgcattttcttgcaccatgtttgagctcatcatctttgaaatcttaggagtattgaatagcagctcccgttattttcactggaaaatgaacctgtgcgtaattctgctgatcctggttttcatggtgcctttttacattggctattttattgtgagcaatatccgactactgcataaacaacgactgcttttttcctgtctcttatggctgacctttatgtatttcttctggaaactaggagatccctttcccattctcagcccaaaacatgggatcttatccatagaacagctcatcagccgggttggtgtgattggagtgactctcatggctcttctttctggatttggtgctgtcaactgcccatacacttacatgtcttacttcctcaggaatgtgactgacacagatattctagccctggaacggcgactgctgcaaaccatggatatgatcataagcaaaaagaaaaggatggcaatggcacggagaacaatgttccagaagggggaagtgcataacaaaccatcaggtttctggggaatgataaaaagtgttaccacttcagcatcaggaagtgaaaatcttactcttattcaacaggaagtggatgctttggaagaattaagcaggcagctttttctggaaacagctgatctatatgctaccaaggagagaatagaatactccaaaaccttcaaggggaaatattttaattttcttggttactttttctctatttactgtgtttggaaaattttcatggctaccatcaatattgtttttgatcgagttgggaaaacggatcctgtcacaagaggcattgagatcactgtgaattatctgggaatccaatttgatgtgaagttttggtcccaacacatttccttcattcttgttggaataatcatcgtcacatccatcagaggattgctgatcactcttaccaagttcttttatgccatctctagcagtaagtcctccaatgtcattgtcctgctattagcacagataatgggcatgtactttgtctcctctgtgctgctgatccgaatgagtatgcctttagaataccgcaccataatcactgaagtccttggagaactgcagttcaacttctatcaccgttggtttgatgtgatcttcctggtcagcgctctctctagcatactcttcctctatttggctcacaaacaggcaccagagaagcaaatggcaccttgaacttaagcctactacagactgttagaggccagtggtttcaaaatttagatataagaggggggaaaaatggaaccagggcctgacattttataaacaaacaaaatgctatggtagcatttttcaccttcatagcatactccttccccctcaggtgatactatgaccatgagtagcatcagccagaacatgagagggagaactaactcaagacaatactcagcagagagcatcccgtgtggatatgaggctggtgtagaggcggagaggagccaagaaactaaaggtgaaaaatacactggaactctggggcaagacatgtctatggtagctgagccaaacacgtaggatttccgttttaaggttcacatggaaaaggttatagctttgccttgagattgactcattaaaatcagagactgt

SEQ ID NO: 597 - protein, 455 aa, Homo sapiens
MSFLIDSSIMITSQILFFGFGWLFFMRQLFKDYEIRQYVVQVIFSVTFAFSCTMFELIIFEILGVLNSSSRYFHWKMNLCVILLILVFMVPFYIGYFIVSNIRLLHKQRLLFSCLLWLTFMYFFWKLGDPFPILSPKHGILSIEQLISRVGVIGVTLMALLSGFGAVNCPYTYMSYFLRNVTDTDILALERRLLQTMDMIISKKKRMAMARRTMFQKGEVHNKPSGFWGMIKSVTTSASGSENLTLIQQEVDALEELSRQLFLETADLYATKERIEYSKTFKGKYFNFLGYFFSIYCVWKIFMATINIVFDRVGKTDPVTRGIEITVNYLGIQFDVKFWSQHISFILVGIIIVTSIRGLLITLTKFFYAISSSKSSNVIVLLLAQIMGMYFVSSVLLIRMSMPLEYRTIITEVLGELQFNFYHRWFDVIFLVSALSSILFLYLAHKQAPEKQMAP

SEQ ID NO: 598 - DNA, 2870 bp, Homo sapiens
aggtcgcaggcgggcgtgcgtggagcgggggccgcggccgcgccgcagagatgtgactcgggccgaaggccagctggagcgtcggcgctgcggggccgcgggggtcgaatgttcgtggcatcagagagaaagatgagagctcaccaggtgctcaccttcctcctgctcttcgtgatcacctcggtggcctctgaaaacgccagcacatcccgaggctgtgggctggacctcctccctcagtacgtgtccctgtgcgacctggacgccatctggggcattgtggtggaggcggtggccggggcgggcgccctgatcacactgctcctgatgctcatcctcctggtgcggctgcccttcatcaaggagaaggagaagaagagccctgtgggcctccactttctgttcctcctggggaccctgggcctctttgggctgacgtttgccttcatcatccaggaggacgagaccatctgctctgtccgccgcttcctctggggcgtcctctttgcgctctgcttctcctgcctgctgagccaggcatggcgcgtgcggaggctggtgcggcatggcacgggccccgcgggctggcagctggtgggcctggcgctgtgcctgatgctggtgcaagtcatcatcgctgtggagtggctggtgctcaccgtgctgcgtgacacaaggccagcctgcgcctacgagcccatggactttgtgatggccctcatctacgacatggtactgcttgtggtcaccctggggctggccctcttcactctgtgcggcaagttcaagaggtggaagctgaacggggccttcctcctcatcacagccttcctctctgtgctcatctgggtggcctggatgaccatgtacctcttcggcaatgtcaagctgcagcagggggatgcctggaacgaccccaccttggccatcacgctggcggccagcggctgggtcttcgtcatcttccacgccatccctgagatccactgcacccttctgccagccctgcaggagaacacgcccaactacttcgacacgtcgcagcccaggatgcgggagacggccttcgaggaggacgtgcagctgccgcgggcctatatggagaacaaggccttctccatggatgaacacaatgcagctctccgaacagcaggatttcccaacggcagcttgggaaaaagacccagtggcagcttggggaaaagacccagcgctccgtttagaagcaacgtgtatcagccaactgagatggccgtcgtgctcaacggtgggaccatcccaactgctccgccaagtcacacaggaagacacctttggtgaaagactttaagttccagagaatcagaatttctcttaccgatttgcctccctggctgtgtctttcttgagggagaaatcggtaacagttgccgaaccaggccgcctcacagccaggaaatttggaaatcctagccaaggggatttcgtgtaaatgtgaacactgacgaactgaaaagctaacaccgactgcccgcccctcccctgccacacacacagacacgtaataccagaccaacctcaatccccgcaaactaaagcaaagctaattgcaaatagtattaggctcactggaaaatgtggctgggaagactgtttcatcctctgggggtagaacagaaccaaattcacagctggtgggccagactggtgttggttggaggtggggggctcccactcttatcacctctccccagcaagtgctggaccccaggtagcctcttggagatgaccgttgcgttgaggacaaatggggactttgccaccggcttgcctggtggtttgcacatttcaggggggtcaggagagttaaggaggttgtgggtgggattccaaggtgaggcccaactgaatcgtggggtgagctttatagccagtagaggtggagggaccctggcatgtgccaaagaagaggccctctgggtgatgaagtgaccatcacatttggaaagtgatcaaccactgttccttctatggggctcttgctctaatgtctatggtgagaacacaggccccgccccttcccttgtagagccatagaaatattctggcttggggcagcagtcccttcttcccttgatcatctcgccctgttcctacacttacgggtgtatctccaaatcctctcccaattttattcccttattcatttcaagagctccaatggggtctccagctgaaagcccctccgggaggcaggttggaaggcaggcaccacggcaggttttccgcgatgatgtcacctagcagggcttcaggggttcccactaggatgcagagatgacctctcgctgcctcacaagcagtgacacctcgggtcctttccgttgctatggtgaaaattcctggatggaatggatcacatgagggtttcttgttgcttttggagggtgtgggggatattttgttttggtttttctgcaggttccatgaaaacagcccttttccaagcccattgtttctgtcatggtttccatctgtcctgagcaagtcattcctttgttatttagcatttcgaacatctcggccattcaaagcccccatgttctctgcactgtttggccagcataacctctagcatcgattcaaagcagagttttaacctgacggcatggaatgtataaatgagggtgggtccttctgcagatactctaatcactacattgctttttctataaaactacccataagcctttaacctttaaagaaaaatgaaaaaggttagtgtttgggggccgggggaggactgaccgcttcataagccagtacgtctgagctgagtatgtttcaataaaccttttgatatttctcaaaaaaaaaaaaaaaaaaaaaaa

SEQ ID NO: 599 - protein, 403 aa, Homo sapiens
MFVASERKMRAHQVLTFLLLFVITSVASENASTSRGCGLDLLPQYVSLCDLDAIWGIVVEAVAGAGALITLLLMLILLVRLPFIKEKEKKSPVGLHFLFLLGTLGLFGLTFAFIIQEDETICSVRRFLWGVLFALCFSCLLSQAWRVRRLVRHGTGPAGWQLVGLALCLMLVQVIIAVEWLVLTVLRDTRPACAYEPMDFVMALIYDMVLLVVTLGLALFTLCGKFKRWKLNGAFLLITAFLSVLIWVAWMTMYLFGNVKLQQGDAWNDPTLAITLAASGWVFVIFHAIPEIHCTLLPALQENTPNYFDTSQPRMRETAFEEDVQLPRAYMENKAFSMDEHNAALRTAGFPNGSLGKRPSGSLGKRPSAPFRSNVYQPTEMAVVLNGGTIPTAPPSHTGRHLW

SEQ ID NO: 600 - DNA, 1749 bp, Homo sapiens
gtggcctcgaggtggtggcagggccgccccctgcagtccggagacgaacgcacggaccgggcctccggaggcaggttcggctggaaggaaccgctctcgcttcgtcctacacttgcgcaaatgtctccgagcttactcacatagcatattggtatatcaaaatgaaatgcaaggaaccaaaaataacataattgaaggcagtaaaagtgaaattaaataggaagatcatcagtcaaggaagacccactggagaggacagaaaatgaagcagtgttttatcatgtgtatttcagcaggtcttcttgaaatttaactaaaaatatgactgctctctcttcagagaactgctcttttcagtaccagttacgtcaaacaaaccagcccctagacgttaactatctgctattcttgatcatacttgggaaaatattattaaatatccttacactaggaatgagaagaaaaaacacctgtcaaaattttatggaatatttttgcatttcactagcattcgttgatcttttacttttggtaaacatttccattatattgtatttcagggattttgtacttttaagcattaggttcactaaataccacatctgcctatttactcaaattatttcctttacttatggctttttgcattatccagttttcctgacagcttgtatagattattgcctgaatttctctaaaacaaccaagctttcatttaagtgtcaaaaattattttatttctttacagtaattttaatttggatttcagtccttgcttatgttttgggagacccagccatctaccaaagcctgaaggcacagaatgcttattctcgtcactgtcctttctatgtcagcattcagagttactggctgtcatttttcatggtgatgattttatttgtagctttcataacctgttgggaagaagttactactttggtacaggctatcaggataacttcctatatgaatgaaactatcttatattttcctttttcatcccactccagttatactgtgagatctaaaaaaatattcttatccaagctcattgtctgttttctcagtacctggttaccatttgtactacttcaggtaatcattgttttacttaaagttcagattccagcatatattgagatgaatattccctggttatactttgtcaatagttttctcattgctacagtgtattggtttaattgtcacaagcttaatttaaaagacattggattacctttggatccatttgtcaactggaagtgctgcttcattccacttacaattcctaatcttgagcaaattgaaaagcctatatcaataatgatttgttaatattattaattaaaagttacagctgtcataagatcataattttatgaacagaaagaactcaggacatattaaaaaataaactgaactaaaacaacttttgccccctgactgatagcatttcagaatgtgtcttttgaagggctataccagttattaaatagtgttttattttaaaaacaaaataattccaagaagtttttatagttattcagggacactatattacaaatattactttgttattaacacaaaaagtgataagagttaacatttggctatactgatgtttgtgttactcaaaaaaactactggatgcaaactgttatgtaaatctgagatttcactgacaactttaagatatcaacctaaacatttttattaaatgttcaaatgtaagcaagaaaaaaaaaa

SEQ ID NO: 601 - protein, 338 aa, Homo sapiens
MTALSSENCSFQYQLRQTNQPLDVNYLLFLIILGKILLNILTLGMRRKNTCQNFMEYFCISLAFVDLLLLVNISIILYFRDFVLLSIRFTKYHICLFTQIISFTYGFLHYPVFLTACIDYCLNFSKTTKLSFKCQKLFYFFTVILIWISVLAYVLGDPAIYQSLKAQNAYSRHCPFYVSIQSYWLSFFMVMILFVAFITCWEEVTTLVQAIRITSYMNETILYFPFSSHSSYTVRSKKIFLSKLIVCFLSTWLPFVLLQVIIVLLKVQIPAYIEMNIPWLYFVNSFLIATVYWFNCHKLNLKDIGLPLDPFVNWKCCFIPLTIPNLEQIEKPISIMIC

SEQ ID NO: 602 - DNA, 14414 bp, Homo sapiens
ggttcccacccatcagaccacagcttccagccaggacagcttgggcagcagtagtcataggagacatctggaggctgaggcttcccacgcggccctcctggctccattggatggcaggctccgggcagacgagctgccaggtgggtgtgggatgcaaaggtttggagcaagagcgccatggggagcctccccagtgggacagaagcacaggagtgagggggttgggccctgaggagatctcagtgtcacccgcaacggctgcagtgcacggcccatggagaaaggacattgtcaggtgagacgtgggcttccaaaggccccaggctgggggttccgagtcctctgatctttccctgaggtgctcctttgaggcctgtggcaccctgggtatgtggattcccgcctcatgtgtccacctgacaagcacttctcccctggactcctgtgcctgctccatcacctgcaccctctcttaattagcaggttggagagtggggtccacattgaatgggacgttgtgttgactcagaattgctcccagctgtgaggaattgttaaacccctacattaaaacgcaagcagctggcattgagcctagggacagaaagaaaagccggcccctcagcctcaccctgcccccagggtggcctctgtgagccaaagccctgaagtggaagagcctcaggaggaaggcagtctgagccatgggctggcagctgcaggaagtacagctcccgctcccagtgaggctgctcccacttctcctgctcaaacctggggctccaggagaactgtttgtaaagactgggggaacttctggaagaggagtgatatctctgtccactccagggctccaacactcccagcactgtgccaggacatggcccccacttaggatgaccgctgcccggtcgggctcccctaaacgcagcctcttgtggcaggcctagcccgagcagccctccctggaagccgtgtgttcagcttcccttctctccagctcctgctgcctcctctaagacagggcaaggggcaggcccggggtcccctccacttctgacatccagtcaacttggatcaggcctgcaggcctgggtgagttcctgggactctcccaataaggttttaaaaaatctttatactttaaaaatttctgccgggcccagtggctcacgcctgtaatcctggcactttgggaagccgaggtgggtggatcacctgaggtcaggagttcgagactagcctggccaacatggtgaactcctgcctctgctaaatatacaaaaattagccaggtgtggtggcgagtgcctgtaatcccagctactcgggaggctgaggcaggagaattgcttggacctgggaggcggaagttgcagtgagctgagattgcaccattgcactccaggctgggtgacagagcaagactgtctcaaaaaaaataaaaataaaaaaataaaactttcttatcaaaaaacaagcaaaagccgcctcgtgatctgatctcaccctactgctacatcctccttgtgtctccatctgtgaaagggtgaccagccttggttctatgcagggtgactgtgaaaatgccatggctcatgggggccaaacatggtggtagggcccactgtgacaagggtgaggctgggctgcacaggctcagctgcccacaaacagctctgggggctcttgggatggctgaggctgctcttgatgagctcagggaagaaacacaacagagactggtcaaaggagaggacacagccttctgcccaatgtccaagagcccgagcccaggaatctcccttgaaacacacactctcacacacactctcacacacacacatgctctcactcactcacactcacacacactcacatgcacacacactcacacattgacaccactgtcagctcagaaatctcccttgaaacacacacactcacacacatacacattcacaccaccatcatcccagaaatctcccttgaaacacatacacactcacacacacacacactcacacacattcccaacaccatcccagaaatcttccttgaaacacacacactcacgaaccctcacacacacacacacacacacgcacacattcatgacaccatcccagaaatctcccttgaaacacatacacactcacatacacatttacgccatcatcccagaagtctcctttgaaacacacactttcacacactcacacacacacactcacacacactcacattcacaccaccatcatccagaaatctcccttgaaacacacacactcacacacacattcatgccaccatcattccagaagtctcccttgaaacacacacacacacacacacactcacacatacacattcacgccaccatcatcagaccttcgtagatagacacccagagaccttggtctgagtgagctggcggcatggagcgactgagcatgtgcagctcccacatcgctatataaagatggggatgaactctgtggctgtgagtcaccataactgcgacactcactcatttgcgcttcaccagacacagagcaaccgccagccccaagagcagctccaggctggatctgcgccggacacaggagaaagcagcgggtaggctaagcaggggtgctgaggatggaggaaagttgggaggctgagcacagctgaagtcctgagctccctgtgcccttgacttctctgtgggctcgagcaaggaccatcccaactcaggatgaaccctccttcggggccaagagtcccgcccagcccaacccaagagcccagctgcatggccaccccagcaccacccagctggtgggacagctcccagagcagcatctccagcctgggccggcttccatccatcagtcccacagtaagcctgggcgagcatgtgcatgcacagagccttccctgaccccttcctggtcccctcctggccacacacaggggctttgacagggagatagaaaaggtctgaactctgctgtggggccttgagccattactggacctctctgagcccgcccctgataaacaggctgatagaggagggtgcaggcaatgtccttcctcatggagagcattcaaggaacagaaatgccagccctgaggacaaggggctggaatggccagacctgtccttggctgcactcattcctttcagaggttgctcggatgccccatggagccctccagggaggagggcacaccctgggcctctggatctgccaagcccacagtgaagccttgggtgccttctgccacctccatcatcctagcccaggcccagggccatattccatcaacaccactgctacctggggaaggccgagggcaccctcaggacctggggatgctggcccaggtgctggacaggatgggaaggctccggtagctataggggccactgcggcaggacagagaccaagccaccctctcttccccagaaaggggttagggtgggaggagtctttaaatccctttgtcctgacctgatatggtcatgacctcccttcagtgaccctgggaggcctaagctttctttctaaagggaattcccttcattttcatgccaggcatcaaggttagctgtacccagctatgctattgggcaatgcagcttctcctctaaggctcagtaggggacgggactcttgagaggggctccacccgactcaccaccccagcgtctagaggcctcaaaaactgtcttgggcccttgggctggagtccatactgcaggcagggatgcacccaggagttggctctgtcttctccctaaggaaagatagggtgaccagggccatgtccctgcttgccagtcacatgtctgtctgtcctaccagcctccagcaggtgatctgagcccactcctagaaggcccctgtgccatgttctaggagcttgggctggactttagaaaggacctgcacttcccttctgcttttggccacttgtgagctgtgtgtgcaactggctttgccactctgagcctcagttttcccacctgccctgttgagaatcctaactcttccttctcaggactatttgaaggtgacaagcgataacatgattccctcgtttctctgtctctccgcaggcacctgggacttgggctgctgcctgggtccccctccccacggttgatgttccagaccatgcccactataccctgggcacagtgatcttgctggtgggactcacggggatgctgggcaacctgacggtcatctataccttctgcaggtgcctggttggtggtgctgggcccagggcactgagggtggcagccatgcagacagggaagaaaatgcaggcaggaatgttgactctagctctggccagggcactgttgaggctaggcaaggagggcagggccatgccttcgatgatctcaggcccagaccttcctgaaggtcacggaaagggccaaaaatggtccagggagacttgactgactggcactaattgagacccaggtgcatcctctgtggagggtgtgtgtgcccagagtatgtgggtctctgaccattctgccctgctctcagcgcacctctccgtcacctgccccagagagcatcctccccctgcgttgaagagcagctctaggccaggcgtggtggctcccgcctgtaatcccagcactttgggaggccaaggcgagcagatcacctgagatcagggttcgagaccagcctggccaatgtggtgaaacccccgtctctactaaaaatacaaaaattagccaggtgtggtggtgtgtgcctataatccaagctgcttgggaggctgaggcaggaaaatcgcctaaacctgggaggcggagtttgcagtgaaccgagatcatgccactgcactctagcctgggcaacagaacaagactccatctcaaaaaaaaaaaaaaaaaaaaaagagcagccctggggaccagcatcctcaagtccctcaaacacccctgacacccacccccagtgtccctctccatctgcccccctgcctggctcagtggctgagacaggcaggtggagaagggaacccaggctgcagggccacacagccccctggctctcccacctgccagctgaaggactgggcacgtcatttctcctccttgagctcacttttctttccgcaaaacagagctgtgcttcgtggagtcactgtgatgatgcagtaagttcacggatgtgcgttgccccacagatgagccacttactgagtgctgtgcaccggagcaagtcacttcatgagtgggagcatcttgtctggaaaatggggacaatgacgcctccctcagggtagatgcaaagatggatgatgacaggagccgaggctggtgaaagtgcctggcccggccgtggtgcacagccatcagctcctctgcccttggccatccccaagcatgaggattacagagacagtgtgcagggcagggtccaggcaggacgtgacactggagggagagtgggagggggacccgcggaggagggaagcgtgagaagccatgggaaagcacagtcagggcacgcaggaggaggaacctagggagaaacctctagggagaccttggcctagagggactcaaggaaaccagtgaattggtcaaggaaatggtgtgagtcgtgcagaggaatttagagggcaagaagaggaaacggacatgacccaagaaccggcctgcgctgggccacgcctcaggttttggagagaaactgccccctgcttctctctgagggagccgtcttggggtcctcactcagcagacactgctgggttcaacagctgcttggctggtccctgcccgacagtgggatagctctgtggcccggcagctcgtgcctgtttgcttgcccatgtgtgtgtgcatgtgtaagtgtgtggcacgtgtgtgcacatgcatacctgaggggtgcgggaagctctccatagctctggaggtgtcaggaagcgcctcctaacagcttctgatcctcccaggagcagaagcctccggacacctgccaacatgttcattatcaacctcgcggtcagcgacttcctcatgtccttcacccaggcccctgtcttcttcaccagtagcctctataagcagtggctctttggggagacaggtagatgctggggctcccttttgctggagggaggaggagggttttgacctggggatgccctcaatggagggtggcccaaaggagggtatttgctgcttctgggcagagagggggtagctgccctcagtcctgtgagtaagcaagaagggaagatgcagtgttggtcctaaggcctctgccagccttggccagatgtggcaggtggagggggtggagtgcgctcagtcctgctcttcctgtgaggtgaaggccagagcagagtctaccctgtccccagaccctcctccccaggactcagagcaggggctgtgcccacaggctgcgagttctatgccttctgtggagctctctttggcatttcctccatgatcaccctgacggccatcgccctggaccgctacctggtaatcacacgcccgctggccacctttggtgtggcgtccaagaggcgtgcggcatttgtcctgctgggcgtttggctctatgccctggcctggagtctgccacccttcttcggctggagtaagtgggctgctggaactggaaggggggcagatgggctgggaggggcacattcaaggggaagtaggtggacttgggtcagccagctggcgggagcagggtgcccaggagctacctgagcctcaggtgagatggacattcaggggacatgactggcagcaagggaaactgacactgccccatcaggggccaaaggatctcttgggcaactgatcccaaaatacaaaggctttctgggcggggcaaagtgacaggtacttctgatgctgtgtcagactaggcagggggctggggtgtgaggactctgaaggtggaacggtggagagcaaggtagtagccctcctggggtaagaccaggcctctggctgaagccctggcaagcaaaaccttgaagttatggtgagctttctgctcaaatctagcaggaatgggaggcagtgggctttgcaggccatcccagttccctccagcttcctcactgcatgggacagggccaggtcagggccagggctgtgtatggggacccgaatgccacatacaaagctcctgccagataaggagccgtggtcagtgccgccccaaaggctgagcacctgccctggctcccaggcgcctacgtgcccgaggggttgctgacatcctgctcctgggactacatgagcttcacgccggccgtgcgtgcctacaccatgcttctctgctgcttcgtgttcttcctccctctgcttatcatcatctactgctacatcttcatcttcagggccatccgggagacaggacggtaagagccgagcatggaggggggctacaggagggggaccggcccctcggccaggcggcccctgccccaccactcacacctgcaccagcctaccagagcatgaccagtgggtgaaggcaagctgagcaagtgcttatggggcagcagtgtctaggggagcctcaggagacaagggcttctggggcgggctttttggcatggcagagggaggagagaaggcacacagaatcaagagggagtagggggcagctgagacctcatgtcacagaaaactttctggaagtcagggctgcctgcactggaaggaatgacactctcacgagtgccctgcaaggatagtccagagaggctccccaacagcagccgtgaccctggtgctgactgccacccgactagggtcagacctggacgatgcgtccttcctagggctctccagaccttcggggcctgcaagggcaatggcgagtccctgtggcagcggcagcggctgcagagcgagtgcaagatggccaagatcatgctgctggtcatcctcctcttcgtgctctcctgggctccctattccgctgtggccctggtggcctttgctgggtaagcagtggctaaagggttggggaagaggctgaaggtgtgggggcaggagcaagaagcctggccagcctctccttcccagcccaaccccggccagccatcctcgcaccctaggaccagcttcacagcttattctctccctgggtaaggtgcccagccccggggtgggtggggggccacctagttcctggaagcaccagggcacatgcagaggagctttgggccccacaaagctttgggcggacggcctgccagccccctttggaacacacagttcctcttgaggtctcctccctctctgcatgggctgtggttacatgaccagaggtgctgcccatctccaggaatgggtccctgagagctgcccttctagccctttgtggctagagtctggggattgtgacatctgcagcagcacagatgcatgctcaacttcagaagtgtttttgagaagtgagggctattaaaccctggaagtgtttagataggagaccttcttgtggaggaatggcctggtccccccagggccctactgtggggtttctctacaatagccagggcaagagagggcatcacggttggggtggggtgtgagaagagctaggcagagggtgcaagggccagagtcaatggggggaagtgggatatcgccagcagcacaggctccaaggaacagtggacctgggaacctccaccccaaattcggcacatcttccttccagagctgcaccctcaaccacccactgctccctcctactcactcagatcagaattctcctggcataggccaggcatggtggctcacgcctgtaatcccagcactttgggaggccaaggcaagtggattacctgaggtcaggagttcgagattagcctggccaaaatggtgaaaccccgtctctactaaaaatacaaaaattagccaggtgtggtgacgggcacctgtagtcccagctactccggaggctgaggcagaagaattgcttgaattcaggaagcagaggttgcagtgagctgagatcacaccactgccactccagcatgggcgacagagcaaaaaaaaaaaaattatcctggcactgccaattcctccctatggggctgacttagctgtgctggtttgggctggattaggatttgggctttggcagggcctggcccagaagagaaggtgtgtcaggagggccagctagcttggggaccacaccttctctgtcctaggtacgcacacgtcctgacaccctacatgagctcggtgccagccgtcatcgccaaggcctctgcaatccacaaccccatcatttacgccatcacccaccccaagtacaggtgtggctcttttccagaaccccacaccttggcctccaagggcctggcctgccgatgggggcagaggccaccacctttctgtctctcgtgtgtgtgtagaatgggggccaccagcagctgggagcggccaatgacactgagtggggtctggagttggtgtgcctccctcccccgccccagcttcccaggggtcacggtgtggagggaggtcagggttccctgggcagtgtccagtcctaactatgggaccttcagacctggcgtgtagggcagccaggacagccctgtgaatttaagcacccccccgccccgccctccccgacagtgtcatcctgaagaaatcacagcagggagagctcagctctgctcccagggcctggcaggagcctggggtggctctgggccagtatgcatgctgatagcaacccggcaaggctgcttctcccttagtgcttccttttgcctggtgatgtcagtcactcaccaccttcccaaggccagtggcaggcctgagcccgtccagcacagaggctgctccagagtgtccctggtctccattaccagagatgtggcttgagccagccactgagggctggaaccaacatccccaggctctccctgcatgcctaccacccagaatctctctgtccctcccaccagccttgtgagcctctcaatctccccacccagcatctgtctttctgtcctcatcacctgccatggttcccagggtctgagcctccccatttccccagaggctctcggtcaccgcacattaggcctgtaccagcctgtgcacccatcccctcccctgcatctgtctgcccatcccctggccctaatcagatgtgcggcccctgcagggtggccattgcccagcacctgccctgcctgggggtgctgctgggtgtatcacgccggcacagtcgcccctaccccagctaccgctccacccaccgctccacgctgaccagccacacctccaacctcagctggatctccatacggaggcgccaggagtccctgggctcggagagtgaggtggtaaggatgctgggccctcaccagcttgcgcctggccatcccttcctcaggcagccctggggctctggggaatacataggccctggcagggctgcctctgagactcagggacactgaggacgctggcaccctggcaggaagagcccctcccaacacccccatgaagttcgtaatcctccctgataggcaggggcactagggccagagcggggatggtttgggggttcccaggagcggggccaggattgaacacaggtcttccaactccaggccatccttttccatgctgacactctccctagagccgcagcctgaagagatcagcacatctggctctagatagggctccagagagacaaggcaggagttagcttggagctccttgctcctcagcattaagccccctcctcctgggagacttgaagagctcacgggatgggcatgggccctggagatgggagatgtggctttgagcctcagcttaccatgtgctcactgtgggagcctgggcaggtcacttactccctctgaggctccacgtcctcctctgaaagggaaaagaggcttctcagatcaacgctgtccaggtgtgcccagggatgggtgtcaaccttcctcggggccaggtgtgcccagggatgggtgtcagccctcctcagggcctgcagctctgcttcccctagatgtccccaggaaagctccgtgcgccaccggctcctgttcccaccacacttgggctcctccttaattctacctacagagccctctatgggcctcagcaagactgccgccaactgaccggccagcgatctcctcccactgcccacatccctggggttctcggttgagggactgagagaggagctgtcagaggtccctcctgtaaaccacttgtagtgaataacaaggagaaatctaatctgttattggaggcctagaccctcgtgaagaccacccatctattcaaaaatataaatagccactttcttagcaaggtgtgccggtgtgcagatggggagcaaacctgcacacacatacacacaccctaggacaggcatgcacaatttacggggtttatttggtgaccggcaacggtgcaaatggtgtcaggggcctcccgcaatgaatacctgttgggaggatgaaggagggcctggtggggtaagggcaggagcaaagctacggactgtccctctcacctcacagtcactctctcacctccctcagggctggacacacatggaggcagcagctgtgtggggagctgcccagcaagcaaatgggcggtccctctacggtcagggtctggaggacttggaagccaaggcaccccccagaccccagggacacgaagcagagactccagggaaggtgactgggcccggtacctgccaatccacaaaggggtgggggttagggtccagtagcccagggagaggccaggaaagagagacttgttctcatgggcacgggcgatatcctccaggaatcacctgctcccagcacctcccagcttttccttgtctgcctggggttctctgtgactctgagatgctctgagcagggcctgcatatggtctgcacatgtgtgtgtgtgtgtgtgatcatgcaactctgactctgcatggtgctgttggctgtgctgtggcatgataagagtacatgtgtgtgttgatgagggtaggaggtctgcagccatcagagcatagctcgagcatgtgtgtggccatgtgcccagcacatgctccatcactgtagcacctggcacatgctctgtcactgtaacacccagtgacacgtgactaagcatgccctaatgtgtctgctttaagctgtgcatgtgactgagtgtgggtggtatgtacctctctgtgtgactgcgaggttggacatacctggggaggaaggggctgtaagctgtggatgtgctcaccataaatgccctaagatcaggatgtcacccggaatacttgtggctattaaaagaaggccagctgtcggcccaagtgcctatggaacggaatgttgatggcgattagagaaggccatattctggaacactagaaatgtcgtgtgcacaggctcccaagcagcccttcgccccagctgacagctccccatctgcccctcctgtcacacccacacaacaccctcagctcagctcctgggctctctccagcttccctagctagtccaaggccaaaggcacattcctgcctgcctttcttcctgagtgctgtgcccctgtgcatccaagaacgaaagccctgggctgtacctgcagtcggggagcctcagcctccctcagcattccccccgggggccccgcaccctgtcctggagcccaggcactgtgcatgccataaacgccaggacaaaggcctggcagtgacccccaggctggccaggcactgatgaaagacacagtgcctgtcttggagggataggctcaggggggttgctgggcagccatcaacaatcaccaaacacatgtgataagcgctgccattgaggtgtgagcacgcagggtactgaaagcagaggcaagtccctgaggttccccaggaagatagaggtgaagcagggatctgcaggcagcaggggtggggagtggggggagcactgagctgtccaggatgaggatacagcctgtgtgactgtgcaaacacaggggcacaggggagggagctcaatatgtcctggaacaggatgtctctctgtgaccctgggagcagccagagggaccctggggattggcagtgggggacataggagaagggaagaggaggcggaggtggtaggagcagtgggaaggccccatcagggactggcttaggtgtctccagacctgacctggggacaggaagccctgggagggggttggttagctttgcagggtgaagaccaaagaaggaagtgctgcagggcaggaaagggatgacccatttaaggacagcaggagcgggggtgatgccagagtctccacatgtggaagagaggagcggattggatggtgggggtgaaggatgggttcagttgtgaccccgggagtcaagagcccggggagcatcccaggagatgctctgtaggcagcgttaggcgttaccagctcttactctgggatgtggactctgggaaggcccatccctgacccaggacacaacctggcccttccatgcaacctcccccactgctcggtgacccagtgtgtggagggtcatcgggagactgcccccagtgaactgctcctcagctaaacagatgtgtgctgtttgtttgcagaccaaggggctgatccccagccaggaccccaggatgtaggacgcccactggctctccctttcttctgagacacatccagcccccccacgtctccctcatatacacagacccaggattatgctgtgagcctgcaggctttggaagtggccctgtcacccgtgctgcacgggattcacagccccagccccatggcccctctccacacctcaaaactcctgccccataacgtcctccgcatccactttccagctcagcagccgcacccgaggctcagcctgaggggtgtgtgcccaggccctcccacttcccgagttgtctgcctctcctcaaatgctgtgtgctgcaattgtccaggcgatgacaatggtgatggctccagagaacacaccagctatttatgagcctctgcccccaggctgggcctgtcactggcataggaaggccagccccgcatctcccactgccaacagctgaagccgagcacagacctccctttgcacgctggaacagttactcacctgtggcttcttcccccagtgtaccgttccactgtggcccacattcttgtgcacgcgggcatttgcaggcacgctctcgcgtagttacctatctgaatgcacaccaagcacatgcgtgcacactctgcgtctgtgattcatttcatgtagtggtctaagctcctcccagggctgtgtggatctgacagggtataggaaaataaaaagcggagaaggtgtcttcag

SEQ ID NO: 603 - protein, 478 aa, Homo sapiens
MNPPSGPRVPPSPTQEPSCMATPAPPSWWDSSQSSISSLGRLPSISPTAPGTWAAAWVPLPTVDVPDHAHYTLGTVILLVGLTGMLGNLTVIYTFCRSRSLRTPANMFIINLAVSDFLMSFTQAPVFFTSSLYKQWLFGETGCEFYAFCGALFGISSMITLTAIALDRYLVITRPLATFGVASKRRAAFVLLGVWLYALAWSLPPFFGWSAYVPEGLLTSCSWDYMSFTPAVRAYTMLLCCFVFFLPLLIIIYCYIFIFRAIRETGRALQTFGACKGNGESLWQRQRLQSECKMAKIMLLVILLFVLSWAPYSAVALVAFAGYAHVLTPYMSSVPAVIAKASAIHNPIIYAITHPKYRVAIAQHLPCLGVLLGVSRRHSRPYPSYRSTHRSTLTSHTSNLSWISIRRRQESLGSESEVGWTHMEAAAVWGAAQQANGRSLYGQGLEDLEAKAPPRPQGHEAETPGKTKGLIPSQDPRM

SEQ ID NO: 604 - DNA, 1041 bp, Homo sapiens
atggatacaggccccgaccagtcctacttctccggcaatcactggttcgtcttctcggtgtaccttctcactttcctggtggggctccccctcaacctgctggccctggtggtcttcgtgggcaagctgcagcgccgcccggtggccgtggacgtgctcctgctcaacctgaccgcctcggacctgctcctgctgctgttcctgcctttccgcatggtggaggcagccaatggcatgcactggcccctgcccttcatcctctgcccactctctggattcatcttcttcaccaccatctatctcaccgccctcttcctggcagctgtgagcattgaacgcttcctgagtgtggcccacccactgtggtacaagacccggccgaggctggggcaggcaggtctggtgagtgtggcctgctggctgttggcctctgctcactgcagcgtggtctacgtcatagaattctcaggggacatctcccacagccagggcaccaatgggacctgctacctggagttccggaaggaccagctagccatcctcctgcccgtgcggctggagatggctgtggtcctctttgtggtcccgctgatcatcaccagctactgctacagccgcctggtgtggatcctcggcagagggggcagccaccgccggcagaggagggtggcggggctgttggcggccacgctgctcaacttccttgtctgctttgggccctacaacgtgtcccatgtcgtgggctatatctgcggtgaaagcccggcatggaggatctacgtgacgcttctcagcaccctgaactcctgtgtcgacccctttgtctactacttctcctcctccgggttccaagccgactttcatgagctgctgaggaggttgtgtgggctctggggccagtggcagcaggagagcagcatggagctgaaggagcagaagggaggggaggagcagagagcggaccgaccagctgaaagaaagaccagtgaacactcacagggctgtggaactggtggccaggtggcctgtgctgaaagctag

SEQ ID NO: 605 - protein, 346 aa, Homo sapiens
MDTGPDQSYFSGNHWFVFSVYLLTFLVGLPLNLLALVVFVGKLQRRPVAVDVLLLNLTASDLLLLLFLPFRMVEAANGMHWPLPFILCPLSGFIFFTTIYLTALFLAAVSIERFLSVAHPLWYKTRPRLGQAGLVSVACWLLASAHCSVVYVIEFSGDISHSQGTNGTCYLEFRKDQLAILLPVRLEMAVVLFVVPLIITSYCYSRLVWILGRGGSHRRQRRVAGLLAATLLNFLVCFGPYNVSHVVGYICGESPAWRIYVTLLSTLNSCVDPFVYYFSSSGFQADFHELLRRLCGLWGQWQQESSMELKEQKGGEEQRADRPAERKTSEHSQGCGTGGQVACAES

SEQ ID NO: 606 - DNA, 1915 bp, Homo sapiens
caagactgctcctctctgccgactacaacagattggagccatggctttggagcagaaccagtcaacagattattattatgaggaaaatgaaatgaatggcacttatgactacagtcaatatgaactgatctgtatcaaagaagatgtcagagaatttgcaaaagttttcctccctgtattcctcacaatagttttcgtcattggacttgcaggcaattccatggtagtggcaatttatgcctattacaagaaacagagaaccaaaacagatgtgtacatcctgaatttggctgtagcagatttactccttctattcactctgcctttttgggctgttaatgcagttcatgggtgggttttagggaaaataatgtgcaaaataacttcagccttgtacacactaaactttgtctctggaatgcagtttctggcttgtatcagcatagacagatatgtggcagtaactaaagtccccagccaatcaggagtgggaaaaccatgctggatcatctgtttctgtgtctggatggctgccatcttgctgagcataccccagctggttttttatacagtaaatgacaatgctaggtgcattcccattttcccccgctacctaggaacatcaatgaaagcattgattcaaatgctagagatctgcattggatttgtagtaccctttcttattatgggggtgtgctactttatcacagcaaggacactcatgaagatgccaaacattaaaatatctcgacccctaaaagttctgctcacagtcgttatagttttcattgtcactcaactgccttataacattgtcaagttctgccgagccatagacatcatctactccctgatcaccagctgcaacatgagcaaacgcatggacatcgccatccaagtcacagaaagcatcgcactctttcacagctgcctcaacccaatcctttatgtttttatgggagcatctttcaaaaactacgttatgaaagtggccaagaaatatgggtcctggagaagacagagacaaagtgtggaggagtttccttttgattctgagggtcctacagagccaaccagtacttttagcatttaaaggtaaaactgctctgccttttgcttggatacatatgaatgatgctttcccctcaaataaaacatctgcattattctgaaactcaaatctcagacgccgtggttgcaacttataataaagaatgggttgggggaagggggagaaataaaagccaagaagaggaaacaagataataaatgtacaaaacatgaaaattaaaatgaacaatataggaaaataattgtaacaggcataagtgaataacactctgctgtaacgaagaagagctttgtggtgataattttgtatcttggttgcagtggtgcttatacaaatctacacaagtgataaaatgacacagaactatatacacacattgtaccaatttcaatttcctggttttgacattatagtataattatgtaagatggaaccattggggaaaactgggtgaagggtacccaggaccactctgtaccatctttgtaacttcctgtgaatttataataatttcaaaataaaacaagttaaaaaaaaacccactatgctataagttaggccatctaaaacagattattaaagaggttcatgttaaaaggcatttataattatttttaattatctaagttttaatacaagaacgatttccctgcataattttagtacttgaataagtatgcagcagaactccaactatcttttttcctgttttttttaaatttgtaagtaattttataaaatccacctcctccaaaaaagcaataaaaaaaaaacaaactataaaaaaaaaaaaaaaaaaaaaaaaaaaaaaaaaaaaaaaaaaaaaaaaaaaaaaaaaaaaaa

SEQ ID NO: 607 - protein, 350 aa, Homo sapiens
MALEQNQSTDYYYEENEMNGTYDYSQYELICIKEDVREFAKVFLPVFLTIVFVIGLAGNSMVVAIYAYYKKQRTKTDVYILNLAVADLLLLFTLPFWAVNAVHGWVLGKIMCKITSALYTLNFVSGMQFLACISIDRYVAVTKVPSQSGVGKPCWIICFCVWMAAILLSIPQLVFYTVNDNARCIPIFPRYLGTSMKALIQMLEICIGFVVPFLIMGVCYFITARTLMKMPNIKISRPLKVLLTVVIVFIVTQLPYNIVKFCRAIDIIYSLITSCNMSKRMDIAIQVTESIALFHSCLNPILYVFMGASFKNYVMKVAKKYGSWRRQRQSVEEFPFDSEGPTEPTSTFSI

SEQ ID NO: 608 - DNA, 1857 bp, Homo sapiens
gatttggggagttatgcgccagtgccccagtgaccgcgggacacggagaggggaagtctgcgttgtacataaggacctagggactccgagcttggcctgagaacccttggacgccgagtgcttgccttacgggctgcactcctcaactctgctccaaagcagccgctgagctcaactcctgcgtccagggcgttcgctgcgcgccaggacgcgcttagtacccagttcctgggctctctcttcagtagctgctttgaaagctcccacgcacgtcccgcaggctagcctggcaacaaaactggggtaaaccgtgttatcttaggtcttgtcccccagaacatgacctagaggtacctgcgcatgcagatggccgatgcagccacgatagccaccatgaataaggcagcaggcggggacaagctagcagaactcttcagtctggtcccggaccttctggaggcggccaacacgagtggtaacgcgtcgctgcagcttccggacttgtggtgggagctggggctggagttgccggacggcgcgccgccaggacatcccccgggcagcggcggggcagagagcgcggacacagaggcccgggtgcggattctcatcagcgtggtgtactgggtggtgtgcgccctggggttggcgggcaacctgctggttctctacctgatgaagagcatgcagggctggcgcaagtcctctatcaacctcttcgtcaccaacctggcgctgacggactttcagtttgtgctcaccctgcccttctgggcggtggagaacgctcttgacttcaaatggcccttcggcaaggccatgtgtaagatcgtgtccatggtgacgtccatgaacatgtacgccagcgtgttcttcctcactgccatgagtgtgacgcgctaccattcggtggcctcggctctgaagagccaccggacccgaggacacggccggggcgactgctgcggccggagcctgggggacagctgctgcttctcggccaaggcgctgtgtgtgtggatctgggctttggccgcgctggcctcgctgcccagtgccattttctccaccacggtcaaggtgatgggcgaggagctgtgcctggtgcgtttcccggacaagttgctgggccgcgacaggcagttctggctgggcctctaccactcgcagaaggtgctgttgggcttcgtgctgccgctgggcatcattatcttgtgctacctgctgctggtgcgcttcatcgccgaccgccgcgcggcggggaccaaaggaggggccgcggtagccggaggacgcccgaccggagccagcgcccggagactgtcgaaggtcaccaaatcagtgaccatcgttgtcctgtccttcttcctgtgttggctgcccaaccaggcgctcaccacctggagcatcctcatcaagttcaacgcggtgcccttcagccaggagtatttcctgtgccaggtatacgcgttccctgtgagcgtgtgcctagcgcactccaacagctgcctcaaccccgtcctctactgcctcgtgcgccgcgagttccgcaaggcgctcaagagcctgctgtggcgcatcgcgtctccttcgatcaccagcatgcgccccttcaccgccactaccaagccggagcacgaggatcaggggctgcaggccccggcgccgccccacgcggccgcggagccggacctgctctactacccacctggcgtcgtggtctacagcggggggcgctacgacctgctgcccagcagctctgcctactgacgcaggcctcaggcccagggcgcgccgtcggggcaaggtggccttccccgggcggtaaagaggtgaaaggatgaaggagggctgggg

SEQ ID NO: 609 - protein, 469 aa, Homo sapiens
MQMADAATIATMNKAAGGDKLAELFSLVPDLLEAANTSGNASLQLPDLWWELGLELPDGAPPGHPPGSGGAESADTEARVRILISVVYWVVCALGLAGNLLVLYLMKSMQGWRKSSINLFVTNLALTDFQFVLTLPFWAVENALDFKWPFGKAMCKIVSMVTSMNMYASVFFLTAMSVTRYHSVASALKSHRTRGHGRGDCCGRSLGDSCCFSAKALCVWIWALAALASLPSAIFSTTVKVMGEELCLVRFPDKLLGRDRQFWLGLYHSQKVLLGFVLPLGIIILCYLLLVRFIADRRAAGTKGGAAVAGGRPTGASARRLSKVTKSVTIVVLSFFLCWLPNQALTTWSILIKFNAVPFSQEYFLCQVYAFPVSVCLAHSNSCLNPVLYCLVRREFRKALKSLLWRIASPSITSMRPFTATTKPEHEDQGLQAPAPPHAAAEPDLLYYPPGVVVYSGGRYDLLPSSSAY

SEQ ID NO: 610 - DNA, 3685 bp, Homo sapiens
ggcacgaggattttactgctgtctcaagatcagattattactgtagagaagatttttattttttgtttcattaacagattattataaagcaaaaagcatgcagaaaaagaagcagacgttttacattgggaattaatgaaagcgtgtctgctagttttgggtaggagaactgggaagttgttgcttaaaattttatatcacctccacaaacaaaactcttcggaaatggtaaaataagaaaatgcatgattctagaggcattcctaagcacccacgtgtcaggctttgtggtgtctgtggtatcatccgaccgtttggactggttagggcttactgagagctccatttctggaaagccttacaagactgaggaatatcagactgcgaatcaccgggaacggttcctttgcagcacagaagcaatctctctccccatcttcgcatattctgatggcaaaacaagtggaagaaaagaggaagcatgactgcagatcagatcagttctctttgtggattatattttcagtaaaatgtatggatctatcttttccttgttcttatatctagatcatgagacttgactgaggctgtatccttatcctccatccatctatggcgaactatagccatgcagctgacaacattttgcaaaatctctcgcctctaacagcctttctgaaactgacttccttgggtttcataataggagtcagcgtggtgggcaacctcctgatctccattttgctagtgaaagataagaccttgcatagagcaccttactacttcctgttggatctttgctgttcagatatcctcagatctgcaatttgtttcccatttgtgttcaactctgtcaaaaatggctctacctggacttatgggactctgacttgcaaagtgattgcctttctgggggttttgtcctgtttccacactgctttcatgctcttctgcatcagtgtcaccagatacttagctatcgcccatcaccgcttctatacaaagaggctgaccttttggacgtgtctggctgtgatctgtatggtgtggactctgtctgtggccatggcatttcccccggttttagacgtgggcacttactcattcattagggaggaagatcaatgcaccttccaacaccgctccttcagggctaatgattccttaggatttatgctgcttcttgctctcatcctcctagccacacagcttgtctacctcaagctgatatttttcgtccacgatcgaagaaaaatgaagccagtccagtttgtagcagcagtcagccagaactggacttttcatggtcctggagccagtggccaggcagctgccaattggctagcaggatttggaaggggtcccacaccacccaccttgctgggcatcaggcaaaatgcaaacaccacaggcagaagaaggctattggtcttagacgagttcaaaatggagaaaagaatcagcagaatgttctatataatgacttttctgtttctaaccttgtggggcccctacctggtggcctgttattggagagtttttgcaagagggcctgtagtaccagggggatttctaacagctgctgtctggatgagttttgcccaagcaggaatcaatccttttgtctgcattttctcaaacagggagctgaggcgctgtttcagcacaacccttctttactgcagaaaatccaggttaccaagggaaccttactgtgttatatgagggagcatctgtaaatctttagccttgtgaaaactaaccttctctgctgagcaattgtggcccatagccatattttgagaagaaattcaagaatggaatcagcagttttaaggatttgggcaacattctgcagtctttgcaatagttcacctataatcctattttaaatctcagagtgatcctgctgactgccagcaaaggtttgtaattaagaagggactgaaccactgccctaagtttctttatgtggtcaaaaactagataatgaaagtagcaggtgctaagtatcagtgctaaatgctctgtatgtcactacatatgaaaaaacatcaaaaaacaattagcattggacatcttaataaattaagttgacatgaggtaaatgtgttgataaaaactaattttagaagtttgaagactttaaaacatttcatactactattgttttgcaaagactaaaatatttggggacttaaagtactgtaatccactaaagacgtgccaatgaattattggaatatcacactttaaaaaccgccttgtaagttctggggagcattccaaagcagtatattggttccaattagagtttactttttttgtattaatacattgctatttctaaataccactttcctcatctactagtaagattgctagcattgaactgtattatgtggtttttgttgatttggtataaagtttttccaattcatttatattttacaaatgctagatattggtctgggaggcaacattaatggtaccagcctgtcacaactgagcagttctaataatgcagaataaatacatgttgccttaaagggttatctagtatccttcatcttatttagcactggagcaaatagccaagggaaatcaaatcagtaactggtcatggtcatgcatctaaaagtgcatggaagatcatttattactttttcctttttttctcacatggtttgaaacttaaagtgcacatcactgaaataatgagattttcttctacggtgtgctaccctttctaaactgttctaagaagcaggcagttgatgtatgtttatattttaagtcagctgtcaaggggagaccacagccttagtatgacatcctgcacaatttgtgaagcatttattctactgaaggcacagtcttgtttatactttctgcacattcagtgtattggtaatttaaattatttcagttttaacttgtgaaagcttatattatgatttctggtattttagaaatacattagagtctgtgagtctcattctttaagatacagatgtgtgaacttcaatataaagttgcatttgccaaaatttacccgtgtagcctgttaattttcttgaaataagttttacatttttggcacataacaacgttttttttaatttgggaggcaagcacaaactaggaagactagctttattatggttttgctttttgattcttgtagctactatattccagactggaaatgtatgaatgataatcaacataatgctgataaactgacataatattatctgtaaaagcattatttggtagtttattataatcatccctctattattcttaaatgccagtagtatttagagatgtgtacctgcttagttaattggctcagaattttaatataaacatcacactttaatttggagcatagtaccatagaaatttggggttctaaatatacaacttgtaagaagaatggtttacactaacattatgacaaaactagaaaaagttattatttttgtttgctttctgttgttttgtttattggttggtttttgtgaagtttattttttttttggtatttgataattaagattaggaatctaataacacagaattccatattgctatagtacttctgtaaagagaatatcaatataaataaggaaaataaatcaatgaaatgtttcaatggttaaaaaaaaaaaaaaaaaaa

SEQ ID NO: 611 - protein, 370 aa, Homo sapiens
MANYSHAADNILQNLSPLTAFLKLTSLGFIIGVSVVGNLLISILLVKDKTLHRAPYYFLLDLCCSDILRSAICFPFVFNSVKNGSTWTYGTLTCKVIAFLGVLSCFHTAFMLFCISVTRYLAIAHHRFYTKRLTFWTCLAVICMVWTLSVAMAFPPVLDVGTYSFIREEDQCTFQHRSFRANDSLGFMLLLALILLATQLVYLKLIFFVHDRRKMKPVQFVAAVSQNWTFHGPGASGQAAANWLAGFGRGPTPPTLLGIRQNANTTGRRRLLVLDEFKMEKRISRMFYIMTFLFLTLWGPYLVACYWRVFARGPVVPGGFLTAAVWMSFAQAGINPFVCIFSNRELRRCFSTTLLYCRKSRLPREPYCVI

SEQ ID NO: 612 - DNA, 231 bp, Homo sapiens
aggctagtggagctcttctccacggtgcccatcggctcccactggggggtgctgtccaagtgcttggcgtacagcaaggccgcatccgacccctttgtgtactccttactgcgacaccagtaccgcaaaagctgcaaggagattctgaacaggctcctgcacagacgctccatccactcctctggcctcacaggcgactctcacagccagaacattctgccggtgtctgag

SEQ ID NO: 613 - protein, 334 aa, Homo sapiens
MNSWDAGLAGLLVGTMGVSLLSNALVLLCLLHSADIRRQAPALFTLNLTCGNLLCTVVNMPLTLAGVVARRQPAGDRLCRLAAFLDTFLAANSMLSMAALSIDRWVAVVFPLSYRAKMRLRDAALMVAYTWLHALTFPAAALALSWLGFHQLYASCTLCSRRPDERLRFAVFTGAFHALSFLLSFVVLCCTYLKVARFHCKRIDVITMQTLVLLVDLHPSVRERCLEEQKRRRQRATKKISTFIGTFLVCFAPYVITRLVELFSTVPIGSHWGVLSKCLAYSKAASDPFVYSLLRHQYRKSCKEILNRLLHRRSIHSSGLTGDSHSQNILPVSE

SEQ ID NO: 614 - DNA, 1122 bp, Homo sapiens
atggccaacactaccggagagcctgaggaggtgagcggcgctctgtccccaccgtccgcatcagcttatgtgaagctggtactgctgggactgattatgtgcgtgagcctggcgggtaacgccatcttgtccctgctggtgctcaaggagcgtgccctgcacaaggctccttactacttcctgctggacctgtgcctggccgatggcatacgctctgccgtctgcttcccctttgtgctggcttctgtgcgccacggctcttcatggaccttcagtgcactcagctgcaagattgtggcctttatggccgtgctcttttgcttccatgcggccttcatgctgttctgcatcagcgtcacccgctacatggccatcgcccaccaccgcttctacgccaagcgcatgacactctggacatgcgcggctgtcatctgcatggcctggaccctgtctgtggccatggccttcccacctgtctttgacgtgggcacctacaagtttattcgggaggaggaccagtgcatctttgagcatcgctacttcaaggccaatgacacgctgggcttcatgcttatgttggctgtgctcatggcagctacccatgctgtctacggcaagctgctcctcttcgagtatcgtcaccgcaagatgaagccagtgcagatggtgccagccatcagccagaactggacattccatggtcccggggccaccggccaggctgctgccaactggatcgccggctttggccgtgggcccatgccaccaaccctgctgggtatccggcagaatgggcatgcagccagccggcggctactgggcatggacgaggtcaagggtgaaaagcagctgggccgcatgttctacgcgatcacactgctctttctgctcctctggtcaccctacatcgtggcctgctactggcgagtgtttgtgaaagcctgtgctgtgccccaccgctacctggccactgctgtttggatgagcttcgcccaggctgccgtcaacccaattgtctgcttcctgctcaacaaggacctcaagaagtgcctgaggactcacgccccctgctggggcacaggaggtgccccggctcccagagaaccctactgtgtcatgtga

SEQ ID NO: 615 - protein, 373 aa, Homo sapiens
MANTTGEPEEVSGALSPPSASAYVKLVLLGLIMCVSLAGNAILSLLVLKERALHKAPYYFLLDLCLADGIRSAVCFPFVLASVRHGSSWTFSALSCKIVAFMAVLFCFHAAFMLFCISVTRYMAIAHHRFYAKRMTLWTCAAVICMAWTLSVAMAFPPVFDVGTYKFIREEDQCIFEHRYFKANDTLGFMLMLAVLMAATHAVYGKLLLFEYRHRKMKPVQMVPAISQNWTFHGPGATGQAAANWIAGFGRGPMPPTLLGIRQNGHAASRRLLGMDEVKGEKQLGRMFYAITLLFLLLWSPYIVACYWRVFVKACAVPHRYLATAVWMSFAQAAVNPIVCFLLNKDLKKCLRTHAPCWGTGGAPAPREPYCVM

SEQ ID NO: 616 - DNA, 3748 bp, Unidentified
gagctctgtccacagactagagcaggaaaggggggaaaggcggcgatagaggttagcaggaatgtttaattatcaggagcaggaacagaactgagggcatgcccaggtccacacaggccctcataggcccagtgttcccagtggggaggaaacaggaagctgtgacttcctctctcttttccctccctgctcttagcctcaaggtcactgctgctgagatgaattccaacctgttttagttggcactgttccctgggcatggtaatagcctctcagtacccttctgccacaaacaccccaaacttctcctttgaaataatattcatacaaattgctatttcacatgtattctctcattgcatcatgccactcctgtgaagcagacttacctgaaaattttaagcaagaaaacaggcttaggggagtaaagtaactctcccagtcacacggctagtgagcagcaggtctgggactccgcagcctccgctctttcctctcttggacacccatgctgattccctgcctctatgccacctcccaggccccttgctttgggccccaagggaacactttttgcagaggagggaggcctctgcactgttaggaacagaggcagctctagtttggttcctgtcatctctgggacagggaaacctccagctctctccctggggtggaggcttggggctgccctccatagcggggtaactctcccttctcccctccctctctgccatttagagcccctcttacaggcgggcgcatgcacatataccctggcattcaggctgtgcctcgccctgccccacctaccaccaatcttgaccaacaggaaggtggtgggttgtcctttccacacccctccctctgaggtgtgggcgtgggccagggctcaccagaggccccagagaagcacttaattctacagcctccttcctagagccttcagtggcctctgccagtctggcagacacttgcagacctctcttctcagcaccaccaatctctgatgccctgcgatgcccacactcaatacttctgcctctccacccacattcttctgggccaatgcctccggaggcagtgtgctgagtgctgatgatgctccgatgcctgtcaaattcctagccctgaggctcatggttgccctggcctatgggcttgtgggggccattggcttgctgggaaatttggcggtgctgtgggtactgagtaactgtgcccggagagcccctggcccaccttcagacaccttcgtcttcaacctggctctggcggacctgggactggcactcactctccccttttgggcagccgagtcggcactggactttcactggcccttcggaggtgccctctgcaagatggttctgacggccactgtcctcaacgtctatgccagcatcttcctcatcacagcgctgagcgttgctcgctactgggtggtggccatggctgcggggccaggcacccacctctcactcttctgggcccgaatagccaccctggcagtgtgggcggcggctgccctggtgacggtgcccacagctgtcttcggggtggagggtgaggtgtgtggtgtgcgcctttgcctgctgcgtttccccagcaggtactggctgggggcctaccagctgcagagggtggtgctggctttcatggtgcccttgggcgtcatcaccaccagctacctgctgctgctggccttcctgcagcggcggcaacggcggcggcaggacagcagggtcgtggcccgctctgtccgcatcctggtggcttccttcttcctctgctggtttcccaaccatgtggtcactctctggggtgtcctggtgaagtttgacctggtgccctggaacagtactttctatactatccagacgtatgtcttccctgtcactacttgcttggcacacagcaatagctgcctcaaccctgtgctgtactgtctcctgaggcgggagccccggcaggctctggcaggcaccttcagggatctgcggtcgaggctgtggccccagggcggaggctgggtgcaacaggtggccctaaagcaggtaggcaggcggtgggtcgcaagcaacccccgggagagccgcccttctaccctgctcaccaacctggacagagggacacccgggtgaagggcgcaagctgaacacactcctctttctgagatccaccaagtgtaggatccttgagtcctggggagaagctgccctctctgccaggctgcagtgccctcagggaaaaagtctgatctttgatccccaactctgggtgtggtgaatgggggaggcgggggctcagatcagagctggatgtgacaaagcttaagtctttatttggagatgggaaagaagaggatctgagaataaacctctggattatccacaaattgtcttgaccttttatcccagttccacctccagttcagtatggaacaaaaggattcgttgctccatttctgctttcgcaagaatacctaggaaaacttccctaagggttctaggctaatgaatcagaggtcagtgcccatctctctctgtacccaccccccacctcaaaacagggtatcccttgtctttctccggtatcaaggccaaaaatgccagcttcccctgtcctcaccttaccatctcagtggtgaccactgaaacttgctgcctgcagaggcctcagctgcaaaagctgtagttcccttgaagggatgccaggtgtggggtattgctggaatttccagcacctgccaggccctgggtgtaaaaccctggtgctgacgggagtgcctgtgtgtctccctctaaatcaggatttgaaagaagtgaagataatgacaagtcaaagacatgggtggggtgaagggaggtgagcgattaaagaggggagggggctgggagaacaggctgcaggtagagccagaaaagcagagactccagaaagtggtgctagtcctccctgccccaaatgcaaagcccagagtatcaatttgagtgtcagagcacctggattcacagctttacctccagcaaattactttacctctttgtacctcactgttctcaactgtaaaatgggctactaaagatttaacagtgaaatatactgttagctattattcttgtttgtttgtttgtttgtttgagacagagtctcgttctgtcgcccaggctggagtgcagtggtgtgatctcagctcactgcaacctccgcttcccgggttcaagcgattctcctgcctcagcctcccgagtagctgggactacaggctcccgctaccatgcctggccaattttttgtaatttttaatagagacagagtttcaccatattggccaggctggtctcaaactcctgacctctagtgatctgcccacctcggcctcccaaagtgctggagttacaggcgtgagccaccgcacccggtcgagctattattcttacaccctgtgtaaaatggagacagagagatgggaggaaataagcgtgcagctgggagatggggatggggaaccatgtctcagctggaatggttgtatatgctctgaagtggggtataatgaaagtctcacataaagaactcagaggttggcccctaagcccctcttgaaggtgtgttctccaggacaggggttcctctttggttcctgtattgagatgcatcaatgataaaggttagccatcagaaggattttctaggaggcagcccctagaaaggagggaggcagagggaagatgaggtagagctc

SEQ ID NO: 617 - protein, 346 aa, Homo sapiens
MPTLNTSASPPTFFWANASGGSVLSADDAPMPVKFLALRLMVALAYGLVGAIGLLGNLAVLWVLSNCARRAPGPPSDTFVFNLALADLGLALTLPFWAAESALDFHWPFGGALCKMVLTATVLNVYASIFLITALSVARYWVVAMAAGPGTHLSLFWARIATLAVWAAAALVTVPTAVFGVEGEVCGVRLCLLRFPSRYWLGAYQLQRVVLAFMVPLGVITTSYLLLLAFLQRRQRRRQDSRVVARSVRILVASFFLCWFPNHVVTLWGVLVKFDLVPWNSTFYTIQTYVFPVTTCLAHSNSCLNPVLYCLLRREPRQALAGTFRDLRLRLWPQGGGWVQQVALKQ

SEQ ID NO: 618 - DNA, 1038 bp, Homo sapiens
atgtacaaggactgcatcgagtccactggagactattttcttctctgtgacgccgaggggccatggggcatcattctggagtccctggccatacttggcatcgtggtcacaattctgctactcttagcatttctcttcctcatgcgaaagatccaagactgcagccagtggaatgtcctccccacccagctcctcttcctcctgagtgtcctggggctcttcggactcgcttttgccttcatcatcgagctcaatcaacaaactgcccccgtacgctactttctctttggggttctctttgctctctgtttctcatgcctcttagctcatgcctccaatctagtgaagctggttcggggttgtgtctccttctcctggacgacaattctgtgcattgctattggttgcagtctgttgcaaatcattattgccactgagtatgtgactctcatcatgaccagaggtatgatgtttgtgaatatgacaccctgccagctcaatgtggactttgttgtactcctggtctatgtcctcttcctgatggccctcacattcttcgtctccaaagccaccttctgtggcccgtgtgagaactggaagcagcatggaaggctcatctttatcactgtgctcttctccatcatcatctgggtggtgtggatctccatgctcctgagaggcaacccgcagttccagcgacagccccagtgggacgacccggtcgtctgcattgctctggtcaccaacgcatgggttttcctgctgctgtacatcgtccctgagctctgcattctctacagatcgtgtagacaggagtgccctttacaaggcaatgcctgccccgtcacagcctaccaacacagcttccaagtggagaaccaggagctctccagagcccgagacagtgatggagctgaggaggatgtagcattaacttcatatggtactcccattcagccgcagactgttgatcccacacaagagtgtttcatcccacaggctaaactaagcccccagcaagatgcaggaggagtataa

SEQ ID NO: 619 - protein, 345 aa, Homo sapiens
MYKDCIESTGDYFLLCDAEGPWGIILESLAILGIVVTILLLLAFLFLMRKIQDCSQWNVLPTQLLFLLSVLGLFGLAFAFIIELNQQTAPVRYFLFGVLFALCFSCLLAHASNLVKLVRGCVSFSWTTILCIAIGCSLLQIIIATEYVTLIMTRGMMFVNMTPCQLNVDFVVLLVYVLFLMALTFFVSKATFCGPCENWKQHGRLIFITVLFSIIIWVVWISMLLRGNPQFQRQPQWDDPVVCIALVTNAWVFLLLYIVPELCILYRSCRQECPLQGNACPVTAYQHSFQVENQELSRARDSDGAEEDVALTSYGTPIQPQTVDPTQECFIPQAKLSPQQDAGGV

SEQ ID NO: 620 - DNA, 1844 bp, Homo sapiens
cgggcaggtggggaacctccctgaagagtgccctggtcacagcacccttgaagacagccattggccatggggacccaaccagagcctggcctgggagccaggatggccatccacaaagccttggtgatgtgcctgggactgcctctcttcctgttcccaggggcctgggcccagggccatgtcccacccggctgcagccaaggcctcaaccccctgtactacaacctgtgtgaccgctctggggcgtggggcatcgtcctggaggccgtggctggggcgggcattgtcaccacgtttgtgctcaccatcatcctggtggccagcctcccctttgtgcaggacaccaagaaacggagcctgctggggacccaggtattcttccttctggggaccctgggcctcttctgcctcgtgtttgcctgtgtggtgaagcccgacttctccacctgtgcctctcggcgcttcctctttggggttctgttcgccatctgcttctcttgtctggcggctcacgtctttgccctcaacttcctggcccggaagaaccacgggccccggggctgggtgatcttcactgtggctctgctgctgaccctggtagaggtcatcatcaatacagagtggctgatcatcaccctggttcggggcagtggcgagggcggccctcagggcaacagcagcgcaggctgggccgtggcctccccctgtgccgtcgccaacatggactttgtcatggcactcatctacgtcatgctgctgctgctgggtgccttcctgggggcctggcccgccctgtgtggccgctacaagcgctggcgtaagcatggggtctttgtgctcctcaccacagccacctccgttgccatatgggtggtgtggatcgtcatgtatacttacggcaacaagcagcacaacagtcccacctgggatgaccccacgctggccatcgccctcgccgccaatgcctgggccttcgtcctcttctacgtcatccccgaggtctcccaggtgaccaagtccagcccagagcaaagctaccagggggacatgtaccccacccggggcgtgggctatgagaccatcctgaaagagcagaagggtcagagcatgttcgtggagaacaaggccttttccatggatgagccggttgcagctaagaggccggtgtcaccatacagcgggtacaatgggcagctgctgaccagtgtgtaccagcccactgagatggccctgatgcacaaagttccgtccgaaggagcttacgacatcatcctcccacgggccaccgccaacagccaggtgatgggcagtgccaactcgaccctgcgggctgaagacatgtactcggcccagagccaccaggcggccacaccgccgaaagacggcaagaactctcaggtctttagaaacccctacgtgtgggactgagtcagcggtggcgaggagaggcgggcggatttggggagggccctgaggacctggccccgggcaagggactctccaggctcctcctccccctggcaggccagcaacatgtgccccagatctggaagggcctccctctctgccagtgtttgggtgggtgtcatgggtgtccccacccactcctcagtgtttgtggagtcgaggagccaaccccagcctcctgccaggatcacctcggcggtcacactccagccaaatagtgttctcggggtggtggctgggcagcgcctatgtttctctggagattcctgcaacctcaagagacttcccaggcgctcaggcctggatcttgctcctctgtgaggaacaagggtgcctaataaatacatttctgctttattaaaaaaaaaaaaaaaaaa

SEQ ID NO: 621 - protein, 453 aa, Homo sapiens
MGTQPEPGLGARMAIHKALVMCLGLPLFLFPGAWAQGHVPPGCSQGLNPLYYNLCDRSGAWGIVLEAVAGAGIVTTFVLTIILVASLPFVQDTKKRSLLGTQVFFLLGTLGLFCLVFACVVKPDFSTCASRRFLFGVLFAICFSCLAAHVFALNFLARKNHGPRGWVIFTVALLLTLVEVIINTEWLIITLVRGSGEGGPQGNSSAGWAVASPCAVANMDFVMALIYVMLLLLGAFLGAWPALCGRYKRWRKHGVFVLLTTATSVAIWVVWIVMYTYGNKQHNSPTWDDPTLAIALAANAWAFVLFYVIPEVSQVTKSSPEQSYQGDMYPTRGVGYETILKEQKGQSMFVENKAFSMDEPVAAKRPVSPYSGYNGQLLTSVYQPTEMALMHKVPSEGAYDIILPRATANSQVMGSANSTLRAEDMYSAQSHQAATPPKDGKNSQVFRNPYVWD

SEQ ID NO: 622 - DNA, 2274 bp, Homo sapiens
atgacatctggttctgtcttcttctacatcttaatttttggaaaatatttttctcatgggggtggacaggatgtcaagtgctcccttggctatttcccctgtgggaacatcacaaagtgcttgcctcagctcctgcactgtaacggtgtggacgactgcgggaatcaggccgatgaggacaactgtggagacaacaatggatggtccatgcaatttgacaaatattttgccagttactacaaaatgacttcccaatatccttttgaggcagaaacacctgaatgtttggtcggttctgtgccagtgcaatgtctttgccaaggtctggagcttgactgtgatgaaaccaatttacgagctgttccatcggtttcttcaaatgtgactgcaatgtcacttcagtggaacttaataagaaagcttcctcctgattgcttcaagaattatcatgatcttcagaagctgtacctgcaaaacaataagattacatccatctccatctatgctttcagaggactgaatagccttactaaactgtatctcagtcataacagaataaccttcctgaagccgggtgtttttgaagatcttcacagactagaatggctgataattgaagataatcacctcagtcgaatttccccaccaacattttatggactaaattctcttattctcttagtcctgatgaataacgtcctcacccgtttacctgataaacctctctgtcaacacatgccaagactacattggctggaccttgaaggcaaccatatccataatttaagaaatttgacttttatttcctgcagtaatttaactgttttagtgatgaggaaaaacaaaattaatcacttaaatgaaaatacttttgcacctctccagaaactggatgaattggatttaggaagtaataagattgaaaatcttccaccgcttatattcaaggacctgaaggagctgtcacaattgaatctttcctataatccaatccagaaaattcaagcaaaccaatttgattatcttgtcaaactcaagtctctcagcctagaagggattgaaatttcaaatatccaacaaaggatgtttagacctcttatgaatctctctcacatatattttaagaaattccagtactgtgggtatgcaccacatgttcgcagctgtaaaccaaacactgatggaatttcatctctagagaatctcttggcaagcattattcagagagtatttgtctgggttgtatctgcagttacctgctttggaaacatttttgtcatttgcatgcgaccttatatcaggtctgagaacaagctgtatgccatgtcaatcatttctctctgctgtgccgactgcttaatgggaatatatttattcgtgatcggaggctttgacctaaagtttcgtggagaatacaataagcatgcgcagctgtggatggagagtactcattgtcagcttgtaggatctttggccattctgtccacagaagtatcagttttactgttaacatttctgacattggaaaaatacatctgcattgtctatccttttagatgtgtgagacctggaaaatgcagaacaattacagttctgattctcatttggattactggttttatagtggctttcattccattgagcaataaggaatttttcaaaaactactatggcaccaatggagtatgcttccctcttcattcagaagatacagaaagtattggagcccagatttattcagtggcaatttttcttggtattaatttggccgcatttatcatcatagttttttcctatggaagcatgttttatagtgttcatcaaagtgccataacagcaactgaaatacggaatcaagttaaaaaagagatgatccttgccaaacgttttttctttatagtatttactgatgcattatgctggatacccatttttgtagtgaaatttctttcactgcttcaggtagaaataccaggtaccataacctcttgggtagtgatttttattctgcccattaacagtgctttgaacccaattctctatactctgaccacaagaccatttaaagaaatgattcatcggttttggtataactacagacaaagaaaatctatggacagcaaaggtcagaaaacatatgctccatcattcatctgggtggaaatgtggccactgcaggagatgccacctgagttaatgaagccggaccttttcacatacccctgtgaaatgtcactgatttctcaatcaacgagactcaattcctattcatga

SEQ ID NO: 623 - protein, 757 aa, Homo sapiens
MTSGSVFFYILIFGKYFSHGGGQDVKCSLGYFPCGNITKCLPQLLHCNGVDDCGNQADEDNCGDNNGWSMQFDKYFASYYKMTSQYPFEAETPECLVGSVPVQCLCQGLELDCDETNLRAVPSVSSNVTAMSLQWNLIRKLPPDCFKNYHDLQKLYLQNNKITSISIYAFRGLNSLTKLYLSHNRITFLKPGVFEDLHRLEWLIIEDNHLSRISPPTFYGLNSLILLVLMNNVLTRLPDKPLCQHMPRLHWLDLEGNHIHNLRNLTFISCSNLTVLVMRKNKINHLNENTFAPLQKLDELDLGSNKIENLPPLIFKDLKELSQLNLSYNPIQKIQANQFDYLVKLKSLSLEGIEISNIQQRMFRPLMNLSHIYFKKFQYCGYAPHVRSCKPNTDGISSLENLLASIIQRVFVWVVSAVTCFGNIFVICMRPYIRSENKLYAMSIISLCCADCLMGIYLFVIGGFDLKFRGEYNKHAQLWMESTHCQLVGSLAILSTEVSVLLLTFLTLEKYICIVYPFRCVRPGKCRTITVLILIWITGFIVAFIPLSNKEFFKNYYGTNGVCFPLHSEDTESIGAQIYSVAIFLGINLAAFIIIVFSYGSMFYSVHQSAITATEIRNQVKKEMILAKRFFFIVFTDALCWIPIFVVKFLSLLQVEIPGTITSWVVIFILPINSALNPILYTLTTRPFKEMIHRFWYNYRQRKSMDSKGQKTYAPSFIWVEMWPLQEMPPELMKPDLFTYPCEMSLISQSTRLNSYS

SEQ ID NO: 624 - DNA, 1182 bp, Homo sapiens
gtctgggggtgggggatgctgggacaggggtcaattgcctgaagcaagtgctctcatccccctagctcctgctgatctagttggggctccagagtggggaggagaaaggcactttgaaacttctctgcccttaccgtcttagccatcaaactctgagctggagatagtgacgatgtgacaggaactttccctgggcctctctgggccacaattcctggccgagagaaagaggaggaatgaggtgagcaccttcttcactcctagggccatgtggtagagctgcagtcgcacctccttctgccaataggcatagatgagtgggttgagcagggagttgcccacgccgagcagccacaggtaccgttccagcactaggtagaggtgacactcctggcaggccacctgcacaatgccagtgataaggaagggggtccaggatagagcaaagctcccaatgagaacagacacagtacggagagctttgaagtcgctgggagtccgtggggatcgataacctccagccatggctcctgcatgttccatctttcgaatctgctggctgtgcatggaggcaatcttgagcatgtcgcagtagaagaagacaaagaggagcatggctgggaagaagccaacgcaggagagggtcagcacgaagtgagggtgaaatacagcaaagaagctgcactgccctttgtaggcagtctgctggaacatggggattccgagtgggaggaagccaatgaggtaagacactaaccacagcccggcaatgcaggccccggccacgaacccactcatgatcttcaagtagcggaagggctgcttgatggcaaggtacctgtcaaaggtgatcagcatgaccgtgaggacagaggcagctgcggaggaagtgacaaatgccatccgcaggctgcacagggtcttctgtgtgggccgagaagggctggagagctggtctgtgagtaggccagagatggccacaccaatcaaggtgtcagccacagccagattcaaggtgaagcagagactgacaccatcattcttgtggatcaacagcagcacagccacagccactagtgtgttagtagcaatgatgagggaggccaggacagcaaggatcactccaaatgagaaagatgattccatgtctcgaagtggcaggacttcacttaccagggcatg

SEQ ID NO: 625 - protein, 335 aa, Homo sapiens
MESSFSFGVILAVLASLIIATNTLVAVAVLLLIHKNDGVSLCFTLNLAVADTLIGVAISGLLTDQLSSPSRPTQKTLCSLRMAFVTSSAAASVLTVMLITFDRYLAIKQPFRYLKIMSGFVAGACIAGLWLVSYLIGFLPLGIPMFQQTAYKGQCSFFAVFHPHFVLTLSCVGFFPAMLLFVFFYCDMLKIASMHSQQIRKMEHAGAMAGGYRSPRTPSDFKALRTVSVLIGSFALSWTPFLITGIVQVACQECHLYLVLERYLWLLGVGNSLLNPLIYAYWQKEVRLQLYHMALGVKKVLTSFLLFLSARNCGPERPRESSCHIVTISSSEFDG

SEQ ID NO: 626 - DNA, 1107 bp, Homo sapiens
atggccaactccacagggctgaacgcctcagaagtcgcaggctcgttggggttgatcctggcagctgtcgtggaggtgggggcactgctgggcaacggcgcgctgctggtcgtggtgctgcgcacgccgggactgcgcgacgcgctctacctggcgcacctgtgcgtcgtggacctgctggcggccgcctccatcatgccgctgggcctgctggccgcaccgccgcccgggctgggccgcgtgcgcctgggccccgcgccatgccgcgccgctcgcttcctctccgccgctctgctgccggcctgcacgctcggggtggccgcacttggcctggcacgctaccgcctcatcgtgcacccgctgcggccaggctcgcggccgccgcctgtgctcgtgctcaccgccgtgtgggccgcggcgggactgctgggcgcgctctccctgctcggcccgccgcccgcaccgccccctgctcctgctcgctgctcggtcctggctgggggcctcgggcccttccggccgctctgggccctgctggccttcgcgctgcccgccctcctgctgctcggcgcctacggcggcatcttcgtggtggcgcgtcgcgctgccctgaggcccccacggccggcgcgcgggtcccgactccgctcggactctctggatagccgcctttccatcttgccgccgctccggcctcgcctgcccgggggcaaggcggccctggccccagcgctggccgtgggccaatttgcagcctgctggctgccttatggctgcgcgtgcctggcgcccgcagcgcgggccgcggaagccgaagcggctgtcacctgggtcgcctactcggccttcgcggctcaccccttcctgtacgggctgctgcagcgccccgtgcgcttggcactgggccgcctctctcgccgtgcactgcctggacctgtgcgggcctgcactccgcaagcctggcacccgcgggcactcttgcaatgcctccagagacccccagagggccctgccgtaggcccttctgaggctccagaacagacccccgagttggcaggagggcggagccccgcataccaggggccacctgagagttctctctcctga

SEQ ID NO: 627 - protein, 368 aa, Homo sapiens
MANSTGLNASEVAGSLGLILAAVVEVGALLGNGALLVVVLRTPGLRDALYLAHLCVVDLLAAASIMPLGLLAAPPPGLGRVRLGPAPCRAARFLSAALLPACTLGVAALGLARYRLIVHPLRPGSRPPPVLVLTAVWAAAGLLGALSLLGPPPAPPPAPARCSVLAGGLGPFRPLWALLAFALPALLLLGAYGGIFVVARRAALRPPRPARGSRLRSDSLDSRLSILPPLRPRLPGGKAALAPALAVGQFAACWLPYGCACLAPAARAAEAEAAVTWVAYSAFAAHPFLYGLLQRPVRLALGRLSRRALPGPVRACTPQAWHPRALLQCLQRPPEGPAVGPSEAPEQTPELAGGRSPAYQGPPESSLS

SEQ ID NO: 628 - DNA, 3689 bp, Homo sapiens
ggaagactacacattttaggtatgtgattagaaaacatacttgtcagaattgtctggctggattaatttgctaatttgaccttcttcatcatttgatgtgatgccagatactaatagcacaatcaatttatcactaagcactcgtgttactttagcattttttatgtccttagtagcttttgctataatgctaggaaatgctttggtcattttagcttttgtggtggacaaaaaccttagacatcgaagtagttatttttttcttaacttggccatctctgacttctttgtgggtgtgatctccattcctttgtacatccctcacacgctgttcgaatgggattttggaaaggaaatctgtgtattttggctcactactgactatctgttatgtacagcatctgtatataacattgtcctcatcagctatgatcgatacctgtcagtctcaaatgctgtgtcttatagaactcaacatactggggtcttgaagattgttactctgatggtggccgtttgggtgctggccttcttagtgaatgggccaatgattctagtttcagagtcttggaaggatgaaggtagtgaatgtgaacctggatttttttcggaatggtacatccttgccatcacatcattcttggaattcgtgatcccagtcatcttagtcgcttatttcaacatgaatatttattggagcctgtggaagcgtgatcatctcagtaggtgccaaagccatcctggactgactgctgtctcttccaacatctgtggacactcattcagaggtagactatcttcaaggagatctctttctgcatcgacagaagttcctgcatcctttcattcagagagacagaggagaaagagtagtctcatgttttcctcaagaaccaagatgaatagcaatacaattgcttccaaaatgggttccttctcccaatcagattctgtagctcttcaccaaagggaacatgttgaactgcttagagccaggagattagccaagtcactggccattctcttaggggtttttgctgtttgctgggctccatattctctgttcacaattgtcctttcattttattcctcagcaacaggtcctaaatcagtttggtatagaattgcattttggcttcagtggttcaattcctttgtcaatcctcttttgtatccattgtgtcacaagcgctttcaaaaggctttcttgaaaatattttgtataaaaaagcaacctctaccatcacaacacagtcggtcagtatcttcttaaagacaattttctcacctctgtaaattttagtctcaatctcacctaaatgaatcaggtctgccctttatcttgcccttttcattctaccaacagatctgcactttgaagtcaatggtaaattactccagtgaataatagcagtataatatgacttgataatatttttgtaaacttgtagtcataatagtactatattcttcttagtcctcacctcttccttgtcttttagatcttaatttcatgctgattacaaaaatccagttttgttttctttctatgttccatgcataatacagtcttaagtgaatttctcttttttaattttatcgtaatagaaacttatccagtttgaaaatcattccctaaagcatgcaataggaaaaagaacctcctggctgggactgcccaactctgttctgatcagtgggtgggtgaggtagggtttgagttggcaagagcagggaacgggcatgtgcccaggtgagctcctgtgtgtgtccagattttatattcctaatcccagtaaggaagaaagcgtagtgtgggagaggagagagctgatgactgcagttctcaaaggtcctcagtgaagttattttggaggccctggtggtcacaggatcagaaggcaagggataggcagtggtcaccaatggttgaaagtatggcttgtcccatttcttcctgttctctttttctagcttccacatcagcttccttttttgagaacatatagaagaagaaggctaagagatggtgaagagactgcatgattaaactagatagacctggtatacagtcactgaactagtagatgtcaataattattatttttaaaaatttttatttgttggccgggcatggtggctcacgcctgaaatcccagcactttgggaggccaaggtgggcggatcatgaggtcaggagatcgagaccatcctggccaacatggtgaaaccccatctgtactaaaatacaaacaagtagctggttgtggcgccgcatgcctgtagtcccagctactcgggaggctgaggcaggggaattgcttgaacccgggaggcggagttttgccagcctggcaacagagcaagactctgtctaaaaagaaaaaaaaatttttttgtttgagacagcatcttgctctgtctcccaggctggagcgtagtaatgcaatcatagctcactgcagcctggaactccttggctcaagcaatcctgctgccttggcctcccaagtatgtgggactacaggtactcgccaccacacctggataattaaaaaattatttctgtagagatgaagtctcactgtgttgcccagcctgggtgtcaataattattttttaaaaaaaatttttaaaaaggttttttgagacagattcttgctctgtcacccaggctggagtgcagtagcatgatcagggatcactgcaacctctgcctcctgggttcaagcgattcttgtgcctaagccacctgagcagctgggattgcaggtgcatgccaccatgcctggctaattttggtatttttagtagagatgaggttttgccattttggtcaggctggaattttttttttttttaattttgataagacagggtattgccgtgttggccagactggtctcaaactcctgggctgaaacaatcctcccgccttggcctcccaaagtgctgggattataggcacaagacaccacaataattattgcctgtatgtcaattattattttaaaatattgttgtatttacttaatgtctttaatgcatttgcccaatattttacattgttactgctcagaggtattcctttattatgtggttagcataggttatactttgctgacgattcacattttattagtttggttatgttttgtccttttaaaacattttcttttgagatgggggtcttgctctgttgcccacgcaggagtgcagtggcatgctctcagctcactgcagccctgactgcctaggctccagcaatcttcttacgtcagcctccagagtagctgggaccgcaggcacttgccaccacgccccactaaaaattttttaaattgttgcctttcttgaagtgttctctgcctgtctttgtcacaaaatttcatttttctcatagttaatttcatctctccggtaagattttattggtgtttcttttataactttgcagttcttacaccgtttggtgattttcatgtttcttagaaactttaaacctttaacttcaaacattaaaatacaagtcttttaagtacatgagtgcttagaaatgtacataatgtttatatacacttatgccttacattaaagtccaatatgagaaatacatgtttaacattcaataataattttaaaaatttgagaaataaactctcataaatgcaaaaaaaaaaaaaaaaaaa

SEQ ID NO: 629 - protein, 390 aa, Homo sapiens
MPDTNSTINLSLSTRVTLAFFMSLVAFAIMLGNALVILAFVVDKNLRHRSSYFFLNLAISDFFVGVISIPLYIPHTLFEWDFGKEICVFWLTTDYLLCTASVYNIVLISYDRYLSVSNAVSYRTQHTGVLKIVTLMVAVWVLAFLVNGPMILVSESWKDEGSECEPGFFSEWYILAITSFLEFVIPVILVAYFNMNIYWSLWKRDHLSRCQSHPGLTAVSSNICGHSFRGRLSSRRSLSASTEVPASFHSERQRRKSSLMFSSRTKMNSNTIASKMGSFSQSDSVALHQREHVELLRARRLAKSLAILLGVFAVCWAPYSLFTIVLSFYSSATGPKSVWYRIAFWLQWFNSFVNPLLYPLCHKRFQKAFLKIFCIKKQPLPSQHSRSVSS

SEQ ID NO: 630 - DNA, 1281 bp, Homo sapiens
cccagacctagaactacccagagcaagaccacagctggtgaacagtccaggagcagacaagatggagacaaattcctctctccccacgaacatctctggagggacacctgctgtatctgctggctatctcttcctggatatcatcacttatctggtatttgcagtcacctttgtcctcggggtcctgggcaacgggcttgtgatctgggtggctggattccggatgacacacacagtcaccaccatcagttacctgaacctggccgtggctgacttctgtttcacctccactttgccattcttcatggtcaggaaggccatgggaggacattggcctttcggctggttcctgtgcaaattcgtctttaccatagtggacatcaacttgttcggaagtgtcttcctgatcgccctcattgctctggaccgctgtgtttgcgtcctgcatccagtctggacccagaaccaccgcaccgtgagcctggccaagaaggtgatcattgggccctgggtgatggctctgctcctcacattgccagttatcattcgtgtgactacagtacctggtaaaacggggacagtagcctgcacttttaacttttcgccctggaccaacgaccctaaagagaggataaatgtggccgttgccatgttgacggtgagaggcatcatccggttcatcattggcttcagcgcacccatgtccatcgttgctgtcagttatgggcttattgccaccaagatccacaagcaaggcttgattaagtccagtcgtcccttacgggtcctctcctttgtcgcagcagccttttttctctgctggtccccatatcaggtggtggcccttatagccacagtcagaatccgtgagttattgcaaggcatgtacaaagaaattggtattgcagtggatgtgacaagtgccctggccttcttcaacagctgcctcaaccccatgctctatgtcttcatgggccaggacttccgggagaggctgatccacgcccttcccgccagtctggagagggccctgaccgaggactcaacccaaaccagtgacacagctaccaattctactttaccttctgcagaggtggagttacaggcaaagtgaggagggagctgggggacactttcgagctcccagctccagcttcgtctcaccttgagttaggctgagcacaggcatttcctgcttattttaggattacccactcatcagaaaaaaaaaaaaaagcctttgtgtcccctgatttggggagaataaacagatatgagttt

SEQ ID NO: 631 - protein, 350 aa, Homo sapiens
METNSSLPTNISGGTPAVSAGYLFLDIITYLVFAVTFVLGVLGNGLVIWVAGFRMTHTVTTISYLNLAVADFCFTSTLPFFMVRKAMGGHWPFGWFLCKFVFTIVDINLFGSVFLIALIALDRCVCVLHPVWTQNHRTVSLAKKVIIGPWVMALLLTLPVIIRVTTVPGKTGTVACTFNFSPWTNDPKERINVAVAMLTVRGIIRFIIGFSAPMSIVAVSYGLIATKIHKQGLIKSSRPLRVLSFVAAAFFLCWSPYQVVALIATVRIRELLQGMYKEIGIAVDVTSALAFFNSCLNPMLYVFMGQDFRERLIHALPASLERALTEDSTQTSDTATNSTLPSAEVELQAK

SEQ ID NO: 632 - DNA, 1062 bp, Homo sapiens
atggaaaccaacttctccattcctctgaatgaaactgaggaggtgctccctgagcctgctggccacaccgttctgtggatcttctcattgctagtccacggagtcacctttgtcttcggggtcctgggcaatgggcttgtgatctgggtggctggattccggatgacacgcacagtcaacaccatctgttacctgaacctggccctagctgacttctctttcagtgccatcctaccattccgaatggtctcagtcgccatgagagaaaaatggccttttgcgtcattcctatgtaagttagttcatgttatgatagacatcaacctgtttgtcagtgtctacctgatcaccatcattgctctggaccgctgtatttgtgtcctgcatccagcctgggcccagaaccatcgcaccatgagtctggccaagagggtgatgacgggactctggattttcaccatagtccttaccttaccaaatttcatcttctggactacaataagtactacgaatggggacacatactgtattttcaactttgcattctggggtgacactgctgtagagaggttgaacgtgttcattaccatggccaaggtctttctgatcctccacttcattattggcttcacggtgcctatgtccatcatcacagtctgctatgggatcatcgctgccaaaattcacagaaaccacatgattaaatccagccgtcccttacgtgtcttcgctgctgtggtggcttctttcttcatctgttggttcccttatgaactaattggcattctaatggcagtctggctcaaagagatgttgttaaatggcaaatacaaaatcattcttgtcctgattaacccaacaagctccttggccttttttaacagctgcctcaacccaattctctacgtctttatgggtcgtaacttccaagaaagactgattcgctctttgcccactagtttggagagggccctgactgaggtccctgactcagcccagaccagcaacacacacaccacttctgcttcacctcctgaggagacggagttacaagcaatgtga

SEQ ID NO: 633 - protein, 353 aa, Homo sapiens
METNFSIPLNETEEVLPEPAGHTVLWIFSLLVHGVTFVFGVLGNGLVIWVAGFRMTRTVNTICYLNLALADFSFSAILPFRMVSVAMREKWPFASFLCKLVHVMIDINLFVSVYLITIIALDRCICVLHPAWAQNHRTMSLAKRVMTGLWIFTIVLTLPNFIFWTTISTTNGDTYCIFNFAFWGDTAVERLNVFITMAKVFLILHFIIGFTVPMSIITVCYGIIAAKIHRNHMIKSSRPLRVFAAVVASFFICWFPYELIGILMAVWLKEMLLNGKYKIILVLINPTSSLAFFNSCLNPILYVFMGRNFQERLIRSLPTSLERALTEVPDSAQTSNTHTTSASPPEETELQAM

SEQ ID NO: 634 - DNA, 3220 bp, Homo sapiens
cggagacgggacagccctgtcccactcactctttcccctgctgctcctgccggcagctcagctggaaccatgggaggccgcgtctttctcgtctttctcgcattctgtgtctggctgactctgccgggagctgaaacccaggactccaggggctgtgcccggtggtgccctcaggactcctcgtgtgtcaatgccaccgcctgtcgctgcaatccagggttcagctctttttctgagatcatcaccacccccatggagacttgtgacgacatcaacgagtgtgcaacactgtcgaaagtgtcatgcggaaaattctcggactgctggaacacagaggggagctacgactgcgtgtgcagcccaggatatgagcctgtttctggggcaaaaacattcaagaatgagagcgagaacacgtgtcaagatgtggacgaatgtcagcagaacccaaggctctgtaaaagctacggcacctgcgtcaacaccctcggcagctacacgtgccagtgcctgcctggcttcaagctcaaacctgaggacccgaagctctgcacagatgtgaatgaatgcacctccggacaaaacccatgccacagctccacccactgcctcaacaacgtgggcagctatcagtgccgctgccgcccgggctggcaaccgattccggggtcccccaatggcccaaacaataccgtctgtgaagatgtggacgagtgcagctccgggcagcatcagtgtgacagctccaccgtctgcttcaacaccgtgggttcatacagctgccgctgccgcccaggctggaagcccagacacggaatcccgaataaccaaaaggacactgtctgtgaagatatgactttctccacctggaccccgccccctggagtccacagccagacgctttcccgattcttcgacaaagtccaggacctgggcagagactacaagccaggcttggccaataacaccatccagagcatcttacaggcgctggatgagctgctggaggcccctggggacctggagaccctgccccgcttacagcagcactgtgtggccagtcacctgctggatggcctagaggatgtcctcagaggcctgagcaagaacctttccaatgggctgttgaacttcagttatcctgcaggcacagaattgtccctggaggtgcagaagcaagtagacaggagtgtcaccttgagacagaatcaggcagtgatgcagctcgactggaatcaggcacagaaatctggtgacccaggcccttctgtggtgggccttgtctccattccagggatgggcaagttgctggctgaggcccctctggtcctggaacctgagaagcagatgcttctgcatgagacacaccagggcttgctgcaggacggctcccccatcctgctctcagatgtgatctctgcctttctgagcaacaacgacacccaaaacctcagctccccagttaccttcaccttctcccaccgttcagtgatcccgagacagaaggtgctctgtgtcttctgggagcatggccagaatggatgtggtcactgggccaccacaggctgcagcacaataggcaccagagacaccagcaccatctgccgttgcacccacctgagcagctttgccgtcctcatggcccactacgatgtgcaggaggaggatcccgtgctgactgtcatcacctacatggggctgagcgtctctctgctgtgcctcctcctggcggccctcacttttctcctgtgtaaagccatccagaacaccagcacctcactgcatctgcagctctcgctctgcctcttcctggcccacctcctcttcctcgtggcaattgatcaaaccggacacaaggtgctgtgctccatcatcgccggtaccttgcactatctctacctggccaccttcacctggatgctgctggaggccctgtacctcttcctcactgcacggaacctgacggtggtcaactactcaagcatcaacagattcatgaagaagctcatgttccctgtgggctacggagtcccagctgtgacagtggccatttctgcagcctccaggcctcacctttatggaacaccttcccgctgctggctccaaccagaaaagggatttatatggggcttccttggacctgtctgcgccatcttctctgtgaatttagttctctttctggtgactctctggattttgaaaaacagactctcctccctcaatagtgaagtgtccaccctccggaacacaaggatgctggcatttaaagcgacagctcagctgttcatcctgggctgcacgtggtgtctgggcatcttgcaggtgggtccggctgcccgggtcatggcctacctcttcaccatcatcaacagcctgcagggtgtcttcatcttcctggtgtactgcctcctcagccagcaggtccgggagcaatatgggaaatggtccaaagggatcaggaaattgaaaactgagtctgagatgcacacactctccagcagtgctaaggctgacacctccaaacccagcacggttaactagaaaaatcttctgaataagatcttccctctttgccggtggaaaatctgaacaatctttgagccatctagaggggaaagaaaagactttgttctgtgtgtttcaagaaattcaccatgtcagcaatatgaaggatgttatggaaggcgtgcttggcattcaattcctgcagaaaccggaaatcttccatgccctgcaatgtgctcatcaaactctcagcatatggacggccagctgtggcccatatcttggtcactctgaagcacaatatttatgaagctatagaacgttaagacctctttcacagcctctccttcctacaaagactcctccaaatcttaaaatgaagcaggaaaacaagcctaagaggactttcataccgacaacatctgaaaggactagaatgttcacaccacgatctggatttcttaattttttgtttttgtttttgttgttctctagttctacgggtttgattatttagtcatgtgaaaaatattgattactcacacatagatcaagagagacacggctcctgccttcatggagcttttaggggaaaatgaagtggctcttgcagctagagttgactcagaagccgaaattcctagaaatcaggtttctactgctaggcaattgaagtataaactattttataaacactgtcttctttcatcttcac

SEQ ID NO: 635 - protein, 823 aa, Homo sapiens [sequence omitted]

SEQ ID NO: 636 - DNA, 3002 bp, Homo sapiens
gccattctctcacatcccgtgcggtcaggaagcccttcctgaactctgacttcagttcttgctgcggtttctgcccatttttttcatatcctctgacagctgcgaggtcatctctgctctggcttttctccaagcagaacaagtgggggctctggaaaggttaagggacctcagtggccaccattatactttgcatctttcctgagaagtgagagttgaaagggaagcaggaaggcccatggtcagattgaaggaaggactttttagtttcttttttttttttttgaaatggagtctcgctctgtcattcaggctggagtgcagtggtgcgatctcagctcactgcagcctccacttcctgggttcacatgattctcctgcctcagcctcccaagtagctgagactacaggcacatgccactacacccagctaacttttgtatttttagtagagacggggtttcaccatgttggccaggctggtctcaaactgctaacatcaagtgatctgctcccctcagcctcccaaagtgctgggattaccggtatgaaccaccacaacctgccaggaatttttagtttttagcttttgcaggagacttcaaggaaaggagacattcctctgtccaggaaacgggtaaggggaccatttctgcattgctggtttcccctcttggcagggtgggcatgaggcatcactgttcctgctccctcactcctgctcctcatgctcagcctgccagctcggcctcaactttgtgtgtctaaagtggaactgaatagtagctgtgagaagataggaaagaggtagtgccaatctccttgcccagatcataaatccagactcagcagggtaaccacatgggcaagcacaaggtaggtgcttggggaaaggggaagtaattggcattctgtgtgataccaaggagaccatttggattttggcttctaccaaagagaatggagaattggttgacctaaatggaaccagtccctttaagtaaggggaggaaagggggtgctggaagatggccctcttcccaccacctagatcatagcttgaactgaagccaaggacagagtgctgcccccttcggcatttactgatgtgccctctttaaatcatgatgttatctaacccaaacccagacccaggacctagtcacagctccaacctacacttcctattaatcttaaaacaaagcgaaacaaacacaaaaagatatcagcattgtagcctccaatctgagcccatttcccttctctggctaccatacctccttctcctatatgataccattcactactttgttcaattatccagtctagacctgcatcttgaggccacacccagccttctcactccccacacccctctttcctctctcactgctccttcctggtctcttctcatctggccccacctctaaggagtcctcctgccttctgggttgccctggaaaacagactatcccccctcctagtgaagggagtgggtaggggtttcagccccaccctcaggaagatgcgtcttccctgtcctctgctctgtggtacttcctctctggctgatttagcaaacagcacctagacctggggccaggcctttggcagtgggacagatccagggataggctacaccaccctgccctgaccctgggattggcatcagcttccaaccagttcctgccaaagcttgtaagtcctcccgacggccatgaacactacatcttctgcagcacccccctcactaggtgtagagttcatctctctgctggctatcatcctgctgtcagtggcgctggctgtggggcttcccggcaacagctttgtggtgtggagtatcctgaaaaggatgcagaagcgctctgtcactgccctgatggtgctgaacctggccctggccgacctggccgtattgctcactgctccctttttccttcacttcctggcccaaggcacctggagttttggactggctggttgccgcctgtgtcactatgtctgcggagtcagcatgtacgccagcgtcctgcttatcacggccatgagtctagaccgctcactggcggtggcccgcccctttgtgtcccagaagctacgcaccaaggcgatggcccggcgggtgctggcaggcatctgggtgttgtcctttctgctggccacacccgtcctcgcgtaccgcacagtagtgccctggaaaacgaacatgagcctgtgcttcccgcggtaccccagcgaagggcaccgggccttccatctaatcttcgaggctgtcacgggcttcctgctgcccttcctggctgtggtggccagctactcggacatagggcgtcggctacaggcccggcgcttccgccgcagccgccgcaccggccgcctggtggtgctcatcatcctgaccttcgccgccttctggctgccctaccacgtggtgaacctggctgaggcgggccgcgcgctggccggccaggccgccgggttagggctcgtggggaagcggctgagcctggcccgcaacgtgctcatcgcactcgccttcctgagcagcagcgtgaaccccgtgctgtacgcgtgcgccggcggcggcctgctgcgctcggcgggcgtgggcttcgtcgccaagctgctggagggcacgggttccgaggcgtccagcacgcgccgcgggggcagcctgggccagaccgctaggagcggccccgccgctctggagcccggcccttccgagagcctcactgcctccagccctctcaagttaaacgaactgaactaggcctggtggaaggaggcgcactttcctcctggcagaatgctagctctgagccagttcagtacctggaggaggagcaggggcgtggagggcgtggagggcgtgggagcgtgggaggcgggagtggagtggaagaagagggagagatggagcaaagtgagggccgagtgagagcgtgctccagcctggctcccacaggcagctttaaccattaaaactgaagtctgaa

SEQ ID NO: 637 - protein, 352 aa, Homo sapiens
MNTTSSAAPPSLGVEFISLLAIILLSVALAVGLPGNSFVVWSILKRMQKRSVTALMVLNLALADLAVLLTAPFFLHFLAQGTWSFGLAGCRLCHYVCGVSMYASVLLITAMSLDRSLAVARPFVSQKLRTKAMARRVLAGIWVLSFLLATPVLAYRTVVPWKTNMSLCFPRYPSEGHRAFHLIFEAVTGFLLPFLAVVASYSDIGRRLQARRFRRSRRTGRLVVLIILTFAAFWLPYHVVNLAEAGRALAGQAAGLGLVGKRLSLARNVLIALAFLSSSVNPVLYACAGGGLLRSAGVGFVAKLLEGTGSEASSTRRGGSLGQTARSGPAALEPGPSESLTASSPLKLNELN

SEQ ID NO: 638 - DNA, 1020 bp, Homo sapiens
atgatgcccttttgccacaatataattaatatttcctgtgtgaaaaacaactggtcaaatgatgtccgtgcttccctgtacagtttaatggtgctcataattctgaccacactcgttggcaatctgatagttattgtttctatatcacacttcaaacaacttcataccccaacaaattggctcattcattccatggccactgtggactttcttctggggtgtctggtcatgccttacagtatggtgagatctgctgagcactgttggtattttggagaagtcttctgtaaaattcacacaagcaccgacattatgctgagctcagcctccattttccatttgtctttcatctccattgaccgctactatgctgtgtgtgatccactgagatataaagccaagatgaatatcttggttatttgtgtgatgatcttcattagttggagtgtccctgctgtttttgcatttggaatgatctttctggagctaaacttcaaaggcgctgaagagatatattacaaacatgttcactgcagaggaggttgctctgtcttctttagcaaaatatctggggtactgacctttatgacttctttttatatacctggatctattatgttatgtgtctattacagaatatatcttatcgctaaagaacaggcaagattaattagtgatgccaatcagaagctccaaattggattggaaatgaaaaatggaatttcacaaagcaaagaaaggaaagctgtgaagacattggggattgtgatgggagttttcctaatatgctggtgccctttctttatctgtacagtcatggacccttttcttcactacattattccacctactttgaatgatgtgttgatttggtttggctacttgaactctacatttaatccaatggtttatgcatttttctatccttggtttagaaaagcactgaagatgatgctgtttggtaaaattttccaaaaagattcatccaggtgtaaattatttttggaattgagttcatag

SEQ ID NO: 639 - protein, 339 aa, Homo sapiens
MMPFCHNIINISCVKNNWSNDVRASLYSLMVLIILTTLVGNLIVIVSISHFKQLHTPTNWLIHSMATVDFLLGCLVMPYSMVRSAEHCWYFGEVFCKIHTSTDIMLSSASIFHLSFISIDRYYAVCDPLRYKAKMNILVICVMIFISWSVPAVFAFGMIFLELNFKGAEEIYYKHVHCRGGCSVFFSKISGVLTFMTSFYIPGSIMLCVYYRIYLIAKEQARLISDANQKLQIGLEMKNGISQSKERKAVKTLGIVMGVFLICWCPFFICTVMDPFLHYIIPPTLNDVLIWFGYLNSTFNPMVYAFFYPWFRKALKMMLFGKIFQKDSSRCKLFLELSS

SEQ ID NO: 640 - DNA, 3517 bp, Homo sapiens
gggttccacatcagccaccactcctgcttctgagcacagggtgctctcctcttgagctcagcttctgattttgcagccaagcattcttgctgctgctgcctgcctgcccacccgcctgggcttgcagcccgccactttactttctccagccctgataccagctgagaagtctccctgcagctgctagttcctgcccaggaccatgtgtgtggatgctgcttgggagaagcgggcacttgctcctggcactgatcccagctgagtttctcctgttgatttctggaccactgatgctgttgctgaggaggtatttcctggcatccctccccctgagacaccggctaaggaccagcctaaacgcaaggcaggacagtgtcaggatggaccgcgctgccagaagccgacgctagcgagggaggtgtgaagagttggccagaatgaccaactcctcctccacatccacctcctccaccaccggtggctcgctgctgctgctctgcgaggaagaggagtcgtgggcgggccggcgcatcccggtgtcactcctgtattcgggcctggccatcgggggcacgctggccaacggcatggtcatctatctcgtgtcgtccttccgaaagctgcagaccaccagcaacgccttcattgtgaacggctgcgccgccgacctcagcgtctgcgccctctggatgccgcaggaggcggtgctcgggctcctgcccaccggctctgcggagccccccgcagactgggacggcgctgggggcagctaccgcctgctacggggtgggctgctgggcctcggactcacggtgtccctcctctcccactgcctcgtggccctgaaccgctacctgctcatcacccgggcgcccgccacctaccaggcgctgtaccagaggcgccacacggcgggcatgctggcgctgtcctgggcgctcgccctgggcctcgtgctgctgctcccgccctgggcaccgcggcccggcgccgcgccaccgcgaatccactacccggcgctgctggccgccgcggcgctgctggcgcagacagctctgctgctgcactgctacctgggcatcgtgcgccgcgtgcgtgtcagcgtcaagcgggtcagcgtgctcaacttccacctgctgcaccagttgcccggctgcgccgccgccgccgccgccttcccgggcgcccagcacgcgccgggccccggtggcgccgcgcacccggcgcaggcccagcccctgccgcccgcgctgcacccgcggcgggcacagcggcgtctcagcggcctgtcggtgctgctgctctgctgcgtcttcctgctggccacgcagccactggtgtgggtgagcctggccagcggcttctcgctgccggtgccctggggagtgcacgcggccagctggctcctgtgctgcgccctgtccgcgctcaacccgctgctctacacgtggaggaacgaggagttccgccgctccgtgcgctcagtcctgccgggcgtcggcgacgcggcggccgctgccgttgccgccacagccgtgcccgcagtgtcccaggcgcaactgggcacccgcgccgcgggccagcactggtaacctagccggggcccgagggaagcggagatccccggcttccgacgtccttgggcaccgtcgcctccttccctcctagggcatcccctgcctgaacgaagacttccgccgcgaagcccgatagatcgggggaaaatggggccttcgaccccagcgggctacctgaaccaaggcgtctctctaagtggggcgcccgaagtcattttggacggccacctgatttttaccctttgtttctgtgttttagaggaatcctaaagtcaaaacaccagagacttgaagaacttgcaaactggcgttttaaaataaccggttaatttatttccacacagtttgtttttgaaaaagagctttcataatgtataaccctttccactttcatcgtcttatatatgaagcgccttgagtgtgcatgaaccaaaggaaataacattgaagaaggaaaacaatatgtagaaagtattttagaaagtaacctgtctttgatgatgcttctcttaccatttagtttttgtatattaccctggggcagtgaagccctaggtgtgcccaccagtatgagttgccattaagacctcaagccctttattcttaaaagggtttttaataaagtctttctcaaatgaggtagaatcttagccagtgagaaaaaaaattattttatgctccttttttttcgcactcttaagactgaaaattggcgttgagtgttatagtgaaaattttccagtttgataattgatggtcagagccagcactggaattttgaaaacaaataaggtgattatctattttaggtaccgtttcacattttctatagcatgcacacttgttgctaccctcattttgtaaccaatttatttgccttatgaatgtgattgcagctttgaacattctgtactgtaatggttgctaagaagaataagtccttctgttttctctttaacatttaaaatatctcaatgcacatgatataattaaacactaataataccatgactgcatagctaatattagctgctattgcatgctcctagatgctagaacttattgggcatgtggtatactgaagcgatacccgttagacaaggatattttacttcttccagacaccagaagaaatggccttcaattatttgaaaagagacacagagacacctctggctacctagagttcttcctgtcttgaccaatttatgagaaagctcccagttgggactttatctcacaagtggaatcacagtcaagacggatcaataatatggttggctcagcaaagccagctgtgctcttttagggtttaaacaagccacacgttagaaagcaacactgtttttatgtagttcatatatattaccacgacatttaacatcaatattgtatatgttgaaggaggtataataaactcagtcatatatagtgaacagttcaaatgggaaagtgttctaaaacatattatttgaggtttgtcatattcatctttggtttactaaatttacttagaaatatttgaaatgcaaaattgtgtgaaatcaccttatcaaattaaaatgggaagaaagtaattttaataatttttaataatcatatgtcagcattctgactacttaccacatcaaatctgggcccaaacagcctcagttaactgcataattcaggaacaaaaccagcttgctttgttgcacgcctgggcaatttcagccaggacattaggaccacttgttgtacatctgaataattatggaagttgggacatgttaaggaaaacaaatatgttcatcaccaacaatcagctgtcattttattaatctatcccttttgtgcatgcaccatttctctcttactaacagtttcatctgttcacattttccttgattcaaatattaaagttcagaaaaaaaaaaaaaaaaaaaaaaaaaaaaaaaaaa

SEQ ID NO: 641 - protein, 384 aa, Homo sapiens
MTNSSSTSTSSTTGGSLLLLCEEEESWAGRRIPVSLLYSGLAIGGTLANGMVIYLVSSFRKLQTTSNAFIVNGCAADLSVCALWMPQEAVLGLLPTGSAEPPADWDGAGGSYRLLRGGLLGLGLTVSLLSHCLVALNRYLLITRAPATYQALYQRRHTAGMLALSWALALGLVLLLPPWAPRPGAAPPRIHYPALLAAAALLAQTALLLHCYLGIVRRVRVSVKRVSVLNFHLLHQLPGCAAAAAAFPGAQHAPGPGGAAHPAQAQPLPPALHPRRAQRRLSGLSVLLLCCVFLLATQPLVWVSLASGFSLPVPWGVHAASWLLCCALSALNPLLYTWRNEEFRRSVRSVLPGVGDAAAAAVAATAVPAVSQAQLGTRAAGQHW

SEQ ID NO: 642 - DNA, 1332 bp, Homo sapiens
ggctgcaataactactacttactggatacattcaaaccctccagaatcaacagttatcaggtaaccaacaagaaatgcaagccgtcgacaacctcacctctgcgcctgggaacaccagtctgtgcaccagagactacaaaatcacccaggtcctcttcccactgctctacactgtcctgttttttgttggacttatcacaaatggcctggcgatgaggattttctttcaaatccggagtaaatcaaactttattatttttcttaagaacacagtcatttctgatcttctcatgattctgacttttccattcaaaattcttagtgatgccaaactgggaacaggaccactgagaacttttgtgtgtcaagttacctccgtcatattttatttcacaatgtatatcagtatttcattcctgggactgataactatcgatcgctaccagaagaccaccaggccatttaaaacatccaaccccaaaaatctcttgggggctaagattctctctgttgtcatctgggcattcatgttcttactctctttgcctaacatgattctgaccaacaggcagccgagagacaagaatgtgaagaaatgctctttccttaaatcagagttcggtctagtctggcatgaaatagtaaattacatctgtcaagtcattttctggattaatttcttaattgttattgtatgttatacactcattacaaaagaactgtaccggtcatacgtaagaacgaggggtgtaggtaaagtccccaggaaaaaggtgaacgtcaaagttttcattatcattgctgtattctttatttgttttgttcctttccattttgcccgaattccttacaccctgagccaaacccgggatgtctttgactgcactgctgaaaatactctgttctatgtgaaagagagcactctgtggttaacttccttaaatgcatgcctggatccgttcatctattttttcctttgcaagtccttcagaaattccttgataagtatgctgaagtgccccaattctgcaacatctctgtcccaggacaataggaaaaaagaacaggatggtggtgacccaaatgaagagactccaatgtaaacaaattaactaaggaaatatttcaatctctttgtgttcagaactcgttaaagcaaagcgctaagtaaaaatattaactgacgaagaagcaactaagttaataataatgactctaaagaaacagaagattacaaaagcaattttcatttacctttccagtatgaaaagctatcttaaaatatagaaaactaatctaaactgtagctgtattagcagcaaaacaaacgac

SEQ ID NO: 643 - protein, 342 aa, Homo sapiens
MQAVDNLTSAPGNTSLCTRDYKITQVLFPLLYTVLFFVGLITNGLAMRIFFQIRSKSNFIIFLKNTVISDLLMILTFPFKILSDAKLGTGPLRTFVCQVTSVIFYFTMYISISFLGLITIDRYQKTTRPFKTSNPKNLLGAKILSVVIWAFMFLLSLPNMILTNRQPRDKNVKKCSFLKSEFGLVWHEIVNYICQVIFWINFLIVIVCYTLITKELYRSYVRTRGVGKVPRKKVNVKVFIIIAVFFICFVPFHFARIPYTLSQTRDVFDCTAENTLFYVKESTLWLTSLNACLDPFIYFFLCKSFRNSLISMLKCPNSATSLSQDNRKKEQDGGDPNEETPM

SEQ ID NO: 644 - DNA, 1047 bp, Homo sapiens
atggtgaataatttctcccaagctgaggctgtggagctgtgttacaagaacgtgaacgaatcctgcattaaaactccttactcgccaggtcctcgatctatcctctacgccgtccttggttttggggctgtgctggcagcgtttggaaacttactggtcatgattgctatccttcacttcaaacaactgcacacacctacaaactttctgattgcgtcgctggcctgtgctgacttcttggtgggagtcactgtgatgcccttcagcacagtgaggtctgtggagagctgttggtactttggggacagttactgtaaattccatacatgttttgacacatccttctgttttgcttctttatttcatttatgctgtatctctgttgatagatacattgctgttactgatcctctgacctatccaaccaagtttactgtgtcagtttcagggatatgcattgttctttcctggttcttttctgtcacatacagcttttcgatcttttacacgggagccaacgaagaaggaattgaggaattagtagttgctctaacctgtgtaggaggctgccaggctccactgaatcaaaactgggtcctactttgttttcttctattctttatacccaatgtcgccatggtgtttatatacagtaagatatttttggtggccaagcatcaggctaggaagatagaaagtacagccagccaagctcagtcctcctcagagagttacaaggaaagagtagcaaaaagagagagaaaggctgccaaaaccttgggaattgctatggcagcatttcttgtctcttggctaccatacctcgttgatgcagtgattgatgcttatatgaattttataactcctccttatgtttatgagattttagtttggtgtgtttattataattcagctatgaaccccttgatttatgctttcttttaccaatggtttgggaaggcaataaaacttattgtaagcggcaaggtcttaaggactgattcgtcaacaactaatttattttctgaagaagtagagacagattaa

SEQ ID NO: 645 - protein, 348 aa, Homo sapiens
MVNNFSQAEAVELCYKNVNESCIKTPYSPGPRSILYAVLGFGAVLAAFGNLLVMIAILHFKQLHTPTNFLIASLACADFLVGVTVMPFSTVRSVESCWYFGDSYCKFHTCFDTSFCFASLFHLCCISVDRYIAVTDPLTYPTKFTVSVSGICIVLSWFFSVTYSFSIFYTGANEEGIEELVVALTCVGGCQAPLNQNWVLLCFLLFFIPNVAMVFIYSKIFLVAKHQARKIESTASQAQSSSESYKERVAKRERKAAKTLGIAMAAFLVSWLPYLVDAVIDAYMNFITPPYVYEILVWCVYYNSAMNPLIYAFFYQWFGKAIKLIVSGKVLRTDSSTTNLFSEEVETD

SEQ ID NO: 646 - DNA, 1014 bp, Homo sapiens
atgaatgagccactagactatttagcaaatgcttctgatttccccgattatgcagctgcttttggaaattgcactgatgaaaacatcccactcaagatgcactacctccctgttatttatggcattatcttcctcgtgggatttccaggcaatgcagtagtgatatccacttacattttcaaaatgagaccttggaagagcagcaccatcattatgctgaacctggcctgcacagatctgctgtatctgaccagcctccccttcctgattcactactatgccagtggcgaaaactggatctttggagatttcatgtgtaagtttatccgcttcagcttccatttcaacctgtatagcagcatcctcttcctcacctgtttcagcatcttccgctactgtgtgatcattcacccaatgagctgcttttccattcacaaaactcgatgtgcagttgtagcctgtgctgtggtgtggatcatttcactggtagctgtcattccgatgaccttcttgatcacatcaaccaacaggaccaacagatcagcctgtctcgacctcaccagttcggatgaactcaatactattaagtggtacaacctgattttgactgcaactactttctgcctccccttggtgatagtgacactttgctataccacgattatccacactctgacccatggactgcaaactgacagctgccttaagcagaaagcacgaaggctaaccattctgctactccttgcattttacgtatgttttttacccttccatatcttgagggtcattcggatcgaatctcgcctgctttcaatcagttgttccattgagaatcagatccatgaagcttacatcgtttctagaccattagctgctctgaacacctttggtaacctgttactatatgtggtggtcagcgacaactttcagcaggctgtctgctcaacagtgagatgcaaagtaagcgggaaccttgagcaagcaaagaaaattagttactcaaacaacccttga

SEQ ID NO: 647 - protein, 337 aa, Homo sapiens
MNEPLDYLANASDFPDYAAAFGNCTDENIPLKMHYLPVIYGIIFLVGFPGNAVVISTYIFKMRPWKSSTIIMLNLACTDLLYLTSLPFLIHYYASGENWIFGDFMCKFIRFSFHFNLYSSILFLTCFSIFRYCVIIHPMSCFSIHKTRCAVVACAVVWIISLVAVIPMTFLITSTNRTNRSACLDLTSSDELNTIKWYNLILTATTFCLPLVIVTLCYTTIIHTLTHGLQTDSCLKQKARRLTILLLLAFYVCFLPFHILRVIRIESRLLSISCSIENQIHEAYIVSGPLAALNTFGNLLLYVVVSDNFQQAVCSTVRCKVSGNLEQAKKISYSNNP

SEQ ID NO: 648 - DNA, 1300 bp, Homo sapiens
tccctggcccttaataaatgacttaatctcttcaagcctctgatttcctctcctgtaaaacaggggcggtaattaccacataacaggctggtcatgaaaatcagtgaacatgcagcaggtgctcaagtcttgtttttgtttccaggggcaccagtggaggttttctgagcatggatccaaccaccccggcctggggaacagaaagtacaacagtgaatggaaatgaccaagcccttcttctgctttgtggcaaggagaccctgatcccggtcttcctgatccttttcattgccctggtcgggctggtaggaaacgggtttgtgctctggctcctgggcttccgcatgcgcaggaacgccttctctgtctacgtcctcagcctggccggggccgacttcctcttcctctgcttccagattataaattgcctggtgtacctcagtaacttcttctgttccatctccatcaatttccctagcttcttcaccactgtgatgacctgtgcctaccttgcaggcctgagcatgctgagcaccgtcagcaccgagcgctgcctgtccgtcctgtggcccatctggtatcgctgccgccgccccagacacctgtcagcggtcgtgtgtgtcctgctctgggccctgtccctactgctgagcatcttggaagggaagttctgtggcttcttatttagtgatggtgactctggttggtgtcagacatttgatttcatcactgcagcgtggctgatttttttattcatggttctctgtgggtccagtctggccctgctggtcaggatcctctgtggctccaggggtctgccactgaccaggctgtacctgaccatcctgctcacagtgctggtgttcctcctctgcggcctgccctttggcattcagtggttcctaatattatggatctggaaggattctgatgtcttattttgtcatattcatccagtttcagttgtcctgtcatctcttaacagcagtgccaaccccatcatttacttcttcgtgggctcttttaggaagcagtggcggctgcagcagccgatcctcaagctggctctccagagggctctgcaggacattgctgaggtggatcacagtgaaggatgcttccgtcagggcaccccggagatgtcgagaagcagtctggtgtagagatggacagcctctacttccatcagatatatgtggctttgagaggcaactttgcccctgtctgtctgatttgctgaactttctcagtcctgattttaaaacagttaagagagtccttgtgaggattaagtgagaca

SEQ ID NO: 649 - protein, 330 aa, Homo sapiens
MDPTTPAWGTESTTVNGNDQALLLLCGKETLIPVFLILFIALVGLVGNGFVLWLLGFRMRRNAFSVYVLSLAGADFLFLCFQIINCLVYLSNFFCSISINFPSFFTTVMTCAYLAGLSMLSTVSTERCLSVLWPIWYRCRRPRHLSAVVCVLLWALSLLLSILEGKFCGFLFSDGDSGWCQTFDFITAAWLIFLFMVLCGSSLALLVRILCGSRGLPLTRLYLTILLTVLVFLLCGLPFGIQWFLILWIWKDSDVLFCHIHPVSVVLSSLNSSANPIIYFFVGSFRKQWRLQQPILKLALQRALQDIAEVDHSEGCFRQGTPEMSRSSLV

SEQ ID NO: 650 - DNA, 1111 bp, Homo sapiens
tcatatacttgacattctttttcgaggcaaagttttagatacacttgtggcattttccctgcatatgtgtgcaaatgcttgtgcctgaagatctttgcttttctgccaggttgcagacttgccactagagctgggattggtcattgtgacattgccgctcatggagtccagtgaagcaggactcagggcaatgctgctcacactatgggaagaataactgtagatcatcttgagaaaggcagactttgtgttaatctcttgcttacaaataataacatagcatttggggatgaatgtgcaatacaggattccatagttagatattaatatgacaataatctccacagctggtacatatttgccaaatgtggtagcatagatagggatgaatgtgatccaagctatgaagtaaatgagcatgccaaatgtaatgaatttggcttcattgtaattctcatatttgcctttgaaagcaaatatgaagcaaatgaaggccaggatggcaatgtagcccagcatggtgccaaatgcaagtatggatccctcctcacactccaggatgatgactctgggcaaggagacattcacctctacagtaggtgctgcaaagattagccagagtgtgcaaatgacaacctggatgcccgtgcaagtgaagataataaggatcggtctatagaggcacttcagaaatttctgtaatttgggatcaaagctgaaggctagcaaaattttcagagacttcgtcaaaatgcaggagatgcaaagagtaaagctcactccaaacattgtctgcctggttttacatgtgaagtcttgtggttctccaatgaaaaagctcgtgctggcaaaattgaggaaatgacagagaaggatcacatagcagactcttaatcccccggatgatttcacaacaggtgtgttcaggtttcttgtaaatattatgccaacaaccagaacaaatatgattcccagtagggagagaatcaggagtaggatggccaaggagtcattccagttgagatattccacttccttttcaaagcacatagtgctcctaacaggggcccagtgagttttgttgttgcataaaaggcagtgaggcatatct

SEQ ID NO: 651 - protein, 755 aa, Homo sapiens
QTLAMIHSIEMINNSTLLPGVKLGYEIYDTCTEVTVAMAATLRFLSKFNCSRETVEFKCDYSSYMPRVKAVIGSGYSEITMAVSRMLNLQLMPQVGYESTAEILSDKIRFPSFLRTVPSDFHQIKAMAHLIQKSGWNWIGIITTDDDYGRLALNTFIIQAEANNVCIAFKEVLPAFLSDNTIEVRINRTLKKIILEAQVNVIVVFLRQFHVFDLFNKAIEMNINKMWIASDNWSTATKITTIPNVKKIGKVVGFAFRRGNISSFHSFLQNLHLLPSDSHKLLHEYAMHLSACAYVKDTDLRLIHSIQLAVFALGYAIRDLCQARDCQNPNAFQPWELLGVLKNVTFTDGWNSFHFDAHGDLNTGYDVVLWKEINGHMTVTKMAEYDLQNDVFIIPDQETKNEFRNLKQIQSKCSKECSPGQMKKTTRSQHICCYECQNCPENHYTNQTDMPHCLLCNNKTHWAPVRSTMCFEKEVEYLNWNDSLAILLLILSLLGIIFVLVVGIIFTRNLNTPVVKSSGGLRVCYVILLCHFLNFASTSFFIGEPQDFTCKTRQTMFGVSFTLCISCILTKSLKILLAFSFDPKLQKFLKCLYRPILIIFTCTGIQVVICTLWLIFAAPTVEVNVSLPRVIILECEEGSILAFGTMLGYIAILAFICFIFAFKGKYENYNEAKFITFGMLIYFIAWITFIPIYATTFGKYVPAVEIIVILISNYGILYCTFIPKCYVIICKQEINTKSAFLKMIYSYSSHSVSSI

SEQ ID NO: 652 - DNA, 2247 bp, Homo sapiens
tttcttgagctaggaaaggtggttggcttacggcacagtagagagcttccagggctggctggcgtgggatacccgtaccacagaaatgcagggaccattgcttcttccaggcctctgctttctgctgagcctctttggagctgtgactcagaaaaccaaaacttcctgtgctaagtgccccccaaatgcttcctgtgtcaataacactcactgcacctgcaaccatggatatacttctggatctgggcagaaactattcacattccccttggagacatgtaacgacattaatgaatgtacaccaccctatagtgtatattgtggatttaacgctgtgtgttacaatgtcgaaggaagtttctactgtcaatgtgtcccaggatatagactgcattctgggaatgaacaattcagtaattccaatgagaacacctgtcaggacaccacctcctcaaagacaaccgagggcaggaaagagctgcaaaagattgtggacaaatttgagtcacttctcaccaatcagactttatggagaacagaagggagacaagaaatctcatccacagctaccactattctccgggatgtggaatcgaaagttctagaaactgccttgaaagatccagaacaaaaagtcctgaaaatccaaaacgatagtgtagctattgaaactcaagcgattacagacaattgctctgaagaaagaaagacattcaacttgaacgtccaaatgaactcaatggacatccgttgcagtgacatcatccagggagacacacaaggtcccagtgccattgcctttatctcatattcttctcttggaaacatcataaatgcaactttttttgaagagatggataagaaagatcaagtgtatctgaactctcaggttgtgagtgctgctattggacccaaaaggaacgtgtctctctccaagtctgtgacgctgactttccagcacgtgaagatgacccccagtaccaaaaaggtcttctgtgtctactggaagagcacagggcagggcagccagtggtccagggatggctgcttcctgatacacgtgaacaagagtcacaccatgtgtaattgcagtcacctgtccagcttcgctgtcctgatggccctgaccagccaggaggaggatcccgtgctgactgtcatcacctacgtggggctgagcgtctctctgctgtgcctcctcctggcggccctcacttttctcctgtgtaaagccatccagaacaccagcacctcactgcatctgcagctctcgctctgcctcttcctggcccacctcctcttcctcgtggggattgatcgaactgaacccaaggtgctgtgctccatcatcgccggtgctttgcactatctctacctggccgccttcacctggatgctgctggagggtgtgcacctcttcctcactgcacggaacctgacagtggtcaactactcaagcatcaatagactcatgaagtggatcatgttcccagtcggctatggcgttcccgctgtgactgtggccatttctgcagcctcctggcctcacctttatggaactgctgatcgatgctggctccacctggaccagggattcatgtggagtttccttggcccagtctgtgccattttctctgcgaatttagtattgtttatcttggtcttttggattttgaaaagaaaactttcctccctcaatagtgaagtgtcaaccatccagaacacaaggatgctggctttcaaagcaacagctcagctcttcatcctgggctgcacatggtgtctgggcttgctacaggtgggtccagctgcccaggtcatggcctacctcttcaccatcatcaacagcctccaaggcttcttcatcttcttggtctactgcctcctcagccagcaggtccagaaacaatatcaaaagtggtttagagagatcgtaaaatcaaaatctgagtctgagacatacacactttccagcaagatgggtcctgactcaaaacccagtgagggggatgtttttccaggacaagtgaagagaaaatattaaaactagaatattcaactccatatggaaaatcatatccatggatctctttggcattatgaagaatgaagctaaggaaaagggaattcattaaacatatcatccttggagaggaagtaatcaacctttacttcccaagctgtttgttctccacaataggctctcaacaaatgtgtggtaaattgcatttctcttcaaaaaaaaaa

SEQ ID NO: 653 - protein, 652 aa, Homo sapiens
MQGPLLLPGLCFLLSLFGAVTQKTKTSCAKCPPNASCVNNTHCTCNHGYTSGSGQKLFTFPLETCNDINECTPPYSVYCGFNAVCYNVEGSFYCQCVPGYRLHSGNEQFSNSNENTCQDTTSSKTTEGRKELQKIVDKFESLLTNQTLWRTEGRQEISSTATTILRDVESKVLETALKDPEQKVLKIQNDSVAIETQAITDNCSEERKTFNLNVQMNSMDIRCSDIIQGDTQGPSAIAFISYSSLGNIINATFFEEMDKKDQVYLNSQVVSAAIGPKRNVSLSKSVTLTFQHVKMTPSTKKVFCVYWKSTGQGSQWSRDGCFLIHVNKSHTMCNCSHLSSFAVLMALTSQEEDPVLTVITYVGLSVSLLCLLLAALTFLLCKAIQNTSTSLHLQLSLCLFLAHLLFLVGIDRTEPKVLCSIIAGALHYLYLAAFTWMLLEGVHLFLTARNLTVVNYSSINRLMKWIMFPVGYGVPAVTVAISAASWPHLYGTADRCWLHLDQGFMWSFLGPVCAIFSANLVLFILVFWILKRKLSSLNSEVSTIQNTRMLAFKATAQLFILGCTWCLGLLQVGPAAQVMAYLFTIINSLQGFFIFLVYCLLSQQVQKQYQKWFREIVKSKSESETYTLSSKMGPDSKPSEGDVFPGQVKRKY

SEQ ID NO: 654 - protein, 207 aa, Homo sapiens
KHAYICLAAIWAYASFWTTMPLVGLGDYVPEPFGTSCTLDWWLAQASVGGQVFILNILFFCLLLPTAVIVFSYVKIIAKVKSSSKEVAHFDSRIHSSHVLEMKLTKVAMLICAGFLIAWIPYAVVSVWSAFGRPDSIPIQLSVVPTLLAKSAAMYNPIIYQVIDYKFACCQTGGLKATKKKSLEGFRLHTVTTVRKSSAVLEIHEEV

SEQ ID NO: 655 - DNA, 11965 bp, Homo sapiens
agcgaaccatcggggcggccgggagccatgttggagcggcgggaggcggcagcagcgtcggggatgctgtggtgggggcggaaaaagccagggccgcacgccggaggggctccggccgcggagtagatggtgcccagagggcggcgggggtgcggagagacaggcggaggggcgggggcccggggcggcggcaggggcccgggagggggcccgagcggcggggccagcccaaggcccggaccggggcggggggcggtggaggccgtgcagggaggcgggagatgatggcgaggcggccgccgtggcggggcctcggggaacggtcgacccccatactcctgctccttctcctctctttgttccccctcagccaggaggagctggggggcggtgggcaccagggctgggacccaggcttagctgccactacggggccaagggcgcatatcggtggcggagccttagctctttgtccggagtcttccggggtccgggaggatggggggcctggcctgggggtcagggagcctatcttcgtggggctccgagggagaaggcaaagcgcccggaatagtcgagggccccctgagcagccgaatgaggagctggggattgaacacggcgtccagccattgggcagccgcgaacgagagacaggacagggaccagggtctgtgttatactggcgcccagaggtctcctcttgcgggcggacaggacctttgcaaagaggtagtctgtcaccaggggctctgtcctcaggggtcccgggctcggggaacagctcgcccctcccttcagactttttgattcggcaccacggtcccaagccggtgtcctcccagcggaacgctgggacaggctcccgcaaaagagtgggcaccgcgcgctgctgtggggaattatgggcaacagggagcaagggtcagggcgagagagccacgacatccggagcagaaaggacagccccccggcggaactgtcttccaggggcctcgggatctggccccgagctggattcagcaccacgcacggcgaggacagctcctgcatcaggttcagcaccccgcgagtctcggacagctcccgagccggcgcccaagcgcatgcgctcccggggtctcttccgctgccgcttcctcccgcagcgccccgggccgcgtcccccgggactcccggcccgtcctgaagccaggaaagtaacctcggcgaaccgggcacgctttcgtcgcgccgcaaaccgccacccgcagtttccgcagtacaactaccagacgctggtgccggagaatgaggcagcaggcaccgcggtgctacgcgtggttgctcaggacccggacgccggcgaggccgggcgcctagtctactcgctggcggcactcatgaacagccgctcgctggagctgttcagcatcgacccgcagagcggccttatccgtacggcggcagctctggaccgcgagagcatggagcgtcactacctgcgtgtgaccgcgcaggaccacgggtcgccgcgcctctcggccaccacgatggtggccgtgacagtagccgaccgcaacgaccactcgccggtttttgagcaagcgcagtaccgggagacccttcgcgagaatgtggaggagggctaccctatcctgcagctgcgtgccactgacggcgacgcgccccccaacgccaacctgcgctaccgcttcgtggggccgccagctgcgcgcgctgcagctgccgccgccttcgagattgatccacgctccggcctcatcagcaccagcggccgagtggaccgcgagcacatggaaagctatgagctggtggtggaagccagcgaccagggccaggaacccgggccgcgctcggccactgtgcgcgtacacataactgtgctagacgagaacgacaatgctcctcagttcagcgagaagcgctacgtggcgcaggtgcgcgaggatgtgcgcccccacacagtcgtgctgcgcgtcacggccactgaccgggacaaggacgccaacggattggtgcactacaacatcatcagtggcaatagccgtggacactttgccatcgacagcctcactggcgagatccaggtggtggcacctctggacttcgaggcagagagagagtatgccttgcgcatcagggcgcaggatgctggccggccaccgctgtccaacaacacgggcctggccagcatccaggtggtggacatcaatgaccacattcctatttttgtcagcacgcccttccaagtttctgtcttggaaaatgctcccttgggtcactcagtcatccacattcaggcagtcgatgcagaccatggggagaatgccagattggagtactccctaactggtgtggcacctgatactccttttgtgataaacagcgccactggctgggtctctgtgagtggtcccctggaccgtgagtctgtggagcattacttctttggtgtggaggctcgagaccatggctcacccccactctctgcctcagccagtgtcaccgtgactgtgctggacgttaatgacaatcggcctgagttcacaatgaaggagtaccacctacgactgaatgaggatgcagctgtgggcaccagtgtggtcagcgtgaccgcagtagaccgtgatgccaacagtgccatcagctaccagatcacaggcggcaacacccggaatcgctttgccatcagcacccaggggggtgtgggtctggtgactctggctctgccactggactacaagcaggaacgctacttcaagctggtactaactgcatctgaccgtgcccttcatgatcactgctatgtgcacatcaacatcacagatgccaacactcatcggccggtctttcaaagtgcccactactcagtgagtgtgaatgaagatcggccaatgggtagcaccatagtggtcatcagtgcctctgatgatgacgtgggtgagaatgctcgtatcacctatctcctggaggacaacctgccccagttccgcattgatgcagactcaggagccattacattacaggccccattagactatgaggaccaggtgacctacaccctggctatcacagctcgggacaatggcatcccacagaaggcagacactacttatgtggaggtgatggtcaatgacgtgaatgacaatgctccacaatttgtggcctcccactatacagggctggtctctgaggatgccccacctttcaccagtgtcctgcagatctcagccactgaccgggatgctcatgccaatggccgggtccagtacactttccagaatggtgaagatggggatggagattttaccattgagcccacctctggaattgtccgtacagtaaggcggctagaccgggaggcagtatcagtgtatgagttgactgcctacgcagtggacagaggtgtgcccccactccggactccagtcagtatccaggtgatggtgcaggatgtgaacgacaatgcacctgtcttcccagctgaggagtttgaggtgcgggtgaaagagaatagcattgtgggctcagtggtggcccagatcactgcagtggaccctgacgaaggccccaatgcccatataatgtaccagatcgtggaggggaacatccctgagctgttccaaatggacatcttctctggagaactgacggcactcattgacctagactatgaggctcgccaagaatatgtgattgtggtgcaggccacatctgctcctttggtcagccgggccactgtgcacgtccgcctggttgaccagaatgacaacagccctgtgctcaacaacttccagatcctcttcaacaactatgtatccaaccgttcagacaccttcccgtcgggcattattgggcgcatcccagcttatgaccccgatgtctccgaccacctcttctactcctttgagcgtggcaatgagctgcagctgctggtagtcaaccagaccagtggggagctgcgactcagccgaaagctagacaataaccgcccactggtggcctccatgttggtgactgtcacagatggcctgcacagcgtgacggcgcagtgtgtgctgcgcgtggtcatcatcacggaggagttgctggccaacagcctgaccgtgcgccttgagaacatgtggcaggagcgcttcctgtcaccgctgctgggccgcttcctcgagggcgtggctgcggtgctcgctacgcccgctgaggacgtcttcatcttcaacatccagaacgacacagacgtagggggcaccgtgctcaatgtgagtttctcggcgctagctccacgtggggccggggcgggcgctgcagggccctggttcagctccgaggagctgcaggagcagttgtacgtgcgccgggcggcgctggcggctcgctccctgctcgacgtactgcccttcgacgacaacgtgtgcctgcgagagccctgtgagaactacatgaaatgcgtgtccgtgctccgctttgactcgtccgcgcccttcctggcctcggcctccacgctgttccgacccatccagcccatcgctggcctgcgctgccgctgcccgcccggattcacgggagacttttgcgagaccgagctcgacctctgctactccaacccatgtcgcaacggcggagcctgcgcgcggcgcgagggaggctacacgtgcgtctgccgcccgcgcttcaccggagaggactgcgagctggacaccgaggccggccgctgcgtgccgggcgtctgccgcaacgggggcacctgcaccgacgcgcccaacggcggctttcgctgccagtgcccggcaggcggcgccttcgagggcccgcgctgcgaggtggctgcgcgctccttcccgcccagttcgttcgtcatgtttcgcggcctgcggcagcgattccaccttacgctgtccctctcgttcgcgacagtgcagcagagcgggctgctcttctacaacgggcgcctgaacgagaagcacgacttcctggccctggaactcgtggctggccaagtgcggctcacatattccacgggtgaatccaacaccgtggtcagccccacagttccagggggcttgagtgacgggcaatggcatacagtgcatctgagatactacaacaagccccggacagatgccctagggggtgcacagggcccctccaaggacaaggtggctgtgctaagcgtggatgattgtgatgtggccgtggctctgcagtttggtgctgagattggcaactactcatgcgcggctgctggtgtgcaaacaagctccaagaagtccctggacctgacgggccctcttcttctgggaggtgtccccaacctccccgagaacttccccgtatcccataaggacttcatcggctgtatgcgggacctgcacattgatggccgccgagtggacatggcggcttttgtcgcaaataatggcaccatggcaggctgccaagccaagctacacttttgtgactcaggcccctgcaagaacagtggcttctgctcggagcgctggggcagcttcagctgcgactgccctgtgggcttcggcggcaaagactgtcagcttactatggcccatccccaccatttccgtggcaacggcacactgagctggaactttggaagtgacatggctgtgtctgtgccatggtacctggggctggcatttcggacacgggcaacgcagggggtcctgatgcaagtgcaggctgggccacacagcacgctcctttgccagctagatcgggggttactgtctgtgacagtgaccaggggctcgggccgtgcttcccatctccttctggaccaggtgactgtcagtgatggccggtggcacgatctgcggctggagttgcaggaggaaccaggtggccggcggggccaccatgtccttatggtctcactggactttagcctcttccaggacaccatggcggtggggagtgagctgcagggcctgaaggtaaagcagctccacgtgggaggcctgccccccggcagtgcagaggaggctcctcagggtctggttggctgcatccagggggtgtggctcggctccacaccctctggctccccggccctgctaccccccagccaccgagtgaatgcggagcctggctgtgttgtgaccaacgcctgtgcctctgggccctgcccacctcacgcagactgccgggacctctggcagaccttttcttgcacctgccagccaggttactacggcccaggctgtgtggatgcctgcctcctgaacccctgtcagaaccagggatcatgccggcacctgccaggagccccccatggctatacctgtgactgtgtgggtggctatttcgggcaccactgtgagcacaggatggaccagcagtgcccacggggctggtgggggagcccaacctgtggcccctgcaactgtgatgttcacaaaggttttgatcccaactgcaacaagacaaatgggcagtgtcactgcaaggagttccactaccgaccgcggggcagtgactcttgcctcccatgtgactgctaccctgtgggctccacctcgcgctcatgtgcaccccacagcgggcagtgcccctgtcgcccaggagcccttggccgccagtgcaacagctgtgacagtcccttcgcagaggtgacagccagcggctgccgggtgctctatgatgcctgccctaagtccctgagatctggtgtgtggtggccccagacaaagtttggcgtcctggccacagtgccctgtccccggggggccctgggtgctgctgtgcggctgtgtgatgaggcccagggttggctggagcccgacctcttcaactgtacctcccctgcctttcgagagctcagtctgctgctggatggcctagagctgaacaagacggcactggataccatggaggccaagaagctggctcagcggctacgggaggtgactggccacactgaccactattttagccaagatgttcgagtcactgcccgcctgctggcccacctgctggccttcgagagccatcagcagggcttcgggctgacagccacacaggatgcccacttcaatgagaatctgctgtgggccggctctgcactgcttgccccagagacaggggacttgtgggcggcgctggggcagcgggcccctgggggctccccaggcagcgcgggactggtgaggcacctggaggagtatgcagccacactcgcaaggaatatggaactcacatacctgaatcccatggggctggtgacgcctaatatcatgctcagcattgaccgcatggagcaccccagttctccccggggggcccgtcgctaccctcgctaccatagcaacctctttcgaggccaggatgcctgggatcctcacacccatgtgctgctgccttcccagtccccacggccatccccatctgaagttctgcccacaagcagcagcatagaaaactccaccacctcaagtgtggtccccccaccagccccgccagagccagagcctgggatctccattatcattctcctcgtttaccgcaccttagggggactgctccctgcccagttccaggcagaacgccgaggtgccaggcttcctcagaaccccgtcatgaactccccggtggtcagcgtggctgtgttccacggacgcaacttcctaaggggaatcctggagtcccccatcagcctagagtttcgcctgctacagacagcgaatcggagcaaggcgatctgtgtgcagtgggacccacctggcctggcggagcagcatggtgtgtggacagcacgggactgcgagctggtgcacaggaatgggtcccacgcacggtgtcgctgcagccggacagggacctttggggtcctcatggatgcctctccccgtgagaggctggagggcgacctggagctgctggctgtgttcacccacgtggtcgtggctgtgtctgtggctgcgctggtgctgactgcagccatcctgctgagcctgcgcagcctcaagtccaatgtgcgtgggatccatgccaatgtggcagccgccctgggggtggcagagctcctcttcctgctggggattcacaggacccacaatcagctggtgtgcactgcagtcgccatcctcctgcactacttcttcctcagcaccttcgcgtggctcttcgtgcaggggctgcacctctaccgcatgcaggttgagccacgcaacgtggaccgcggcgccatgcgcttctaccatgccctgggctggggcgtccctgctgtgctgctgggccttgctgtgggcctggaccctgagggctatgggaaccctgacttctgctggatctcagtccacgagcccctcatctggagctttgctggccctgttgtcctggtcatagtgatgaacgggaccatgtttctcctcgctgcccgcacatcctgctccacagggcagagggaggccaagaagacctctgcactgacccttcgcagctccttcctgctgcttctgctggtcagtgcctcctggctctttgggctcctggcagtcaaccacagcatcctagccttccactacctccatgctggactctgcggcctccagggcctggcggtgctgctgctcttctgtgtcctaaatgcagatgctcgggctgcctggatgccagcctgtctgggcaggaaggcagcgcctgaggaggcaaggccagcacctgggctgggacctggggcctacaacaacacggctctctttgaggagagtggcctcatccgcatcactctgggcgcctccaccgtctcctctgtgagcagtgcccgctccggccggacccaggaccaggacagccagcggggccgcagctacctcagggacaatgtcctggttcgacatggctcagccgctgaccacactgaccacagcctccaggctcatgctggccccactgacctggacgtggccatgttccatcgagatgctggcgcagactccgactctgacagtgacctgtccttggaggaggagaggagtctctccattccatcttcagaaagcgaggacaatggccggacgcgggggcgcttccaacggccactctgccgagcagcccagagtgagaggctcctcacccaccccaaagatgtggatggcaatgacctcctgtcctactggccagccctgggggagtgcgaggcagccccctgtgctctgcagacttggggctctgaaaggcgcctggggctggacaccagcaaggatgcagctaacaacaaccagccagacccggccctgaccagtggggatgagacttctctgggccgggcccagcgccagaggaaaggcatcctgaagaaccggttgcaatacccactggtgccacagacccgaggtgcccctgagctgtcctggtgccgtgcagccaccttgggccaccgtgcagtgccagctgcctcttacggtcgcatctatgctggcgggggcacgggcagcctttcacagccagccagccgctactcttctagagaacagctggacctgctcctccggcggcaactgagccgtgagcgactagaggaagcccctgcccctgttctacgtcccctgagccggccagggtcccaggaatgcatggatgctgcaccaggccgactggagcccaaagatcggggcagcaccctgccacggaggcagccacctcgggactaccctggcgccatggctggccgcttcgggtcacgggatgcgctcgacttaggggcacctcgagagtggttgagcacgctgcctccgccccgccgcacccgggaccttgacccacagcccccacctctgcccctgtctccccagcggcaactctcaagggaccccctcttgccatcccggccgctggactctctgtctaggagctcgaactctcgggagcagctggaccaggtgcctagccggcacccctcacgagaagcccttgggccactcccgcagctgctcagagctagggaggactcggtcagtggccccagccatggcccctccacagaacagttggacattctttcctccatccttgcctctttcaactcctcggccctctcctctgtgcaatcttcaagcacacccttgggccctcacaccactgccacaccttctgccacagcctctgtgcttgggccctccacgccacgttctgccacgtctcacagcatctcggagctgtcgccagactcagaagttcccagaagtgagggtcactcctgaggggatgacggcgtggacgaggaacagctgagggcgacagaggatctaggctaacaggagagactccaggagtgggggcagatcccaaggcagcctcctgctccccagtggtgggtgccccagctctacctggtgtggcagggctgaggctccatgtgcatctgtgagcatgcgtgtgacaggtgcagagacgggggactggagggagacttttatacgttttgtacctttgtaaccagagagatgcttatgttatttttcagcttttctgtctcctggggggtttgaggctgggctgggagggggagggagatagagggagagatgcagtttgaccccatttgggtcctgagcaaaccctatgctcatctctctctccttcctggggtggactcagatgggtgggacacatgccttcctccccctattccacccccaagttgatctgagtatcgtcaggggcccaaagtacagaattgttctttgctttttattgaatgctccaaaggccaaacttctggggctgggggttggtcttggaaacaggggtcctctgacttcctcatgggggcttgctcataccgcccctcctggtggatgtgtgtgtttattatgtggagtccctgccacttactgccttatgacctaggactgatgctgtggggtgctggtggagcagctgatgtcgtgtttacagagcaaggcttccctgtctcccacggggaggggctcgggcctctagtcagacattcctgcagagggtcggtggaggggtcattcacctgcccctgcagcaagcaaaagttgtctgtggtgccatttgattccctgacactgccccctgcttgaattgattccgaagggtagggtgggaaggtgagcaaagggagcagaaacaagggaattcaagacccagaatgtaggtgccactgcctcctatgtttacaggatcctccgtggccctaggcacctgggctgcaggaagtgactccgttccactcctcctttattcccttaaaaagggaaaaatgactgttacgaccctgttcacaaaactcttacttttgctattttgtctgctgtccagaactgaagactttaaaattttgttactgtttacaagtccagattcaaaaaatgtttttactttgtttacaactcaaaactttgagttttacactttgtttacagtagataattttttttcctttgtttccaagtgaaaggtagggaaagtgggagagggacttggaggacccacctgtgaggaccctgacctggccatcttgaggggttttctaacccccaggtctcccaggccgaaggtcagccttgagtcccgtttaacagcagatccagaagaccttgagagtaggcgtcctctaaccacgggggagagtggctgtgcagggctggggggtggtctgtgcagacacctcctcacccaccaccccatgcatactcttgggaagcagcttcctgggagattagaaattctacttccctgactggagctaaatcccaccagccaggacccaaactctccttaccgagaaggaccccagctcttgaagggctgagtggcctgctgggggtgggagggtgtctttactatgtcctaggtttcgtagatgcccctctctggggttcccctcctccagcccagcggccctctttcctgtctgtgtaaattgttccgtgaagccgcgctctgttttgggaataaacttctatagaaaacaaaa

SEQ ID NO: 656 - protein, 3312 aa, Homo sapiens
MMARRPPWRGLGERSTPILLLLLLSLFPLSQEELGGGGHQGWDPGLAATTGPRAHIGGGALALCPESSGVREDGGPGLGVREPIFVGLRGRRQSARNSRGPPEQPNEELGIEHGVQPLGSRERETGQGPGSVLYWRPEVSSCGRTGPLQRGSLSPGALSSGVPGSGNSSPLPSDFLIRHHGPKPVSSQRNAGTGSRKRVGTARCCGELWATGSKGQGERATTSGAERTAPRRNCLPGASGSGPELDSAPRTARTAPASGSAPRESRTAPEPAPKRMRSRGLFRCRFLPQRPGPRPPGLPARPEARKVTSANRARFRRAANRHPQFPQYNYQTLVPENEAAGTAVLRVVAQDPDAGEAGRLVYSLAALMNSRSLELFSIDPQSGLIRTAAALDRESMERHYLRVTAQDHGSPRLSATTMVAVTVADRNDHSPVFEQAQYRETLRENVEEGYPILQLRATDGDAPPNANLRYRFVGPPAARAAAAAAFEIDPRSGLISTSGRVDREHMESYELVVEASDQGQEPGPRSATVRVHITVLDENDNAPQFSEKRYVAQVREDVRPHTVVLRVTATDRDKDANGLVHYNIISGNSRGHFAIDSLTGEIQVVAPLDFEAEREYALRIRAQDAGRPPLSNNTGLASIQVVDINDHIPIFVSTPFQVSVLENAPLGHSVIHIQAVDADHGENARLEYSLTGVAPDTPFVINSATGWVSVSGPLDRESVEHYFFGVEARDHGSPPLSASASVTVTVLDVNDNRPEFTMKEYHLRLNEDAAVGTSVVSVTAVDRDANSAISYQITGGNTRNRFAISTQGGVGLVTLALPLDYKQERYFKLVLTASDRALHDHCYVHINITDANTHRPVFQSAHYSVSVNEDRPMGSTIVVISASDDDVGENARITYLLEDNLPQFRIDADSGAITLQAPLDYEDQVTYTLAITARDNGIPQKADTTYVEVMVNDVNDNAPQFVASHYTGLVSEDAPPFTSVLQISATDRDAHANGRVQYTFQNGEDGDGDFTIEPTSGIVRTVRRLDREAVSVYELTAYAVDRGVPPLRTPVSIQVMVQDVNDNAPVFPAEEFEVRVKENSIVGSVVAQITAVDPDEGPNAHIMYQIVEGNIPELFQMDIFSGELTALIDLDYEARQEYVIVVQATSAPLVSRATVHVRLVDQNDNSPVLNNFQILFNNYVSNRSDTFPSGIIGRIPAYDPDVSDHLFYSFERGNELQLLVVNQTSGELRLSRKLDNNRPLVASMLVTVTDGLHSVTAQCVLRVVIITEELLANSLTVRLENMWQERFLSPLLGRFLEGVAAVLATPAEDVFIFNIQNDTDVGGTVLNVSFSALAPRGAGAGAAGPWFSSEELQEQLYVRRAALAARSLLDVLPFDDNVCLREPCENYMKCVSVLRFDSSAPFLASASTLFRPIQPIAGLRCRCPPGFTGDFCETELDLCYSNPCRNGGACARREGGYTCVCRPRFTGEDCELDTEAGRCVPGVCRNGGTCTDAPNGGFRCQCPAGGAFEGPRCEVAARSFPPSSFVMFRGLRQRFHLTLSLSFATVQQSGLLFYNGRLNEKHDFLALELVAGQVRLTYSTGESNTVVSPTVPGGLSDGQWHTVHLRYYNKPRTDALGGAQGPSKDKVAVLSVDDCDVAVALQFGAEIGNYSCAAAGVQTSSKKSLDLTGPLLLGGVPNLPENFPVSHKDFIGCMRDLHIDGRRVDMAAFVANNGTMAGCQAKLHFCDSGPCKNSGFCSERWGSFSCDCPVGFGGKDCQLTMAHPHHFRGNGTLSWNFGSDMAVSVPWYLGLAFRTRATQGVLMQVQAGPHSTLLCQLDRGLLSVTVTRGSGRASHLLLDQVTVSDGRWHDLRLELQEEPGGRRGHHVLMVSLDFSLFQDTMAVGSELQGLKVKQLHVGGLPPGSAEEAPQGLVGCIQGVWLGSTPSGSPALLPPSHRVNAEPGCVVTNACASGPCPPHADCRDLWQTFSCTCQPGYYGPGCVDACLLNPCQNQGSCRHLPGAPHGYTCDCVGGYFGHHCEHRMDQQCPRGWWGSPTCGPCNCDVHKGFDPNCNKTNGQCHCKEFHYRPRGSDSCLPCDCYPVGSTSRSCAPHSGQCPCRPGALGRQCNSCDSPFAEVTASGCRVLYDACPKSLRSGVWWPQTKFGVLATVPCPRGALGAAVRLCDEAQGWLEPDLFNCTSPAFRELSLLLDGLELNKTALDTMEAKKLAQRLREVTGHTDHYFSQDVRVTARLLAHLLAFESHQQGFGLTATQDAHFNENLLWAGSALLAPETGDLWAALGQRAPGGSPGSAGLVRHLEEYAATLARNMELTYLNPMGLVTPNIMLSIDRMEHPSSPRGARRYPRYHSNLFRGQDAWDPHTHVLLPSQSPRPSPSEVLPTSSSIENSTTSSVVPPPAPPEPEPGISIIILLVYRTLGGLLPAQFQAERRGARLPQNPVMNSPVVSVAVFHGRNFLRGILESPISLEFRLLQTANRSKAICVQWDPPGLAEQHGVWTARDCELVHRNGSHARCRCSRTGTFGVLMDASPRERLEGDLELLAVFTHVVVAVSVAALVLTAAILLSLRSLKSNVRGIHANVAAALGVAELLFLLGIHRTHNQLVCTAVAILLHYFFLSTFAWLFVQGLHLYRMQVEPRNVDRGAMRFYHALGWGVPAVLLGLAVGLDPEGYGNPDFCWISVHEPLIWSFAGPVVLVIVMNGTMFLLAARTSCSTGQREAKKTSALTLRSSFLLLLLVSASWLFGLLAVNHSILAFHYLHAGLCGLQGLAVLLLFCVLNADARAAWMPACLGRKAAPEEARPAPGLGPGAYNNTALFEESGLIRITLGASTVSSVSSARSGRTQDQDSQRGRSYLRDNVLVRHGSAADHTDHSLQAHAGPTDLDVAMFHRDAGADSDSDSDLSLEEERSLSIPSSESEDNGRTRGRFQRPLCRAAQSERLLTHPKDVDGNDLLSYWPALGECEAAPCALQTWGSERRLGLDTSKDAANNNQPDPALTSGDETSLGRAQRQRKGILKNRLQYPLVPQTRGAPELSWCRAATLGHRAVPAASYGRIYAGGGTGSLSQPASRYSSREQLDLLLRRQLSRERLEEAPAPVLRPLSRPGSQECMDAAPGRLEPKDRGSTLPRRQPPRDYPGAMAGRFGSRDALDLGAPREWLSTLPPPRRTRDLDPQPPPLPLSPQRQLSRDPLLPSRPLDSLSRSSNSREQLDQVPSRHPSREALGPLPQLLRAREDSVSGPSHGPSTEQLDILSSILASFNSSALSSVQSSSTPLGPHTTATPSATASVLGPSTPRSATSHSISELSPDSEVPRSEGHS

SEQ ID NO: 657 - DNA, 1293 bp, Homo sapiens
atggagggggagccctcccagcctcccaacagcagttggcccctaagtcagaatgggactaacactgaggccaccccggctacaaacctcaccttctcctcctactatcagcacacctcccctgtggcggccatgttcattgtggcctatgcgctcatcttcctgctctgcatggtgggcaacaccctggtctgtttcatcgtgctcaagaaccggcacatgcatactgtcaccaacatgttcatcctcaacctggctgtcagtgacctgctggtgggcatcttctgcatgcccaccacccttgtggacaacctcatcactgggtggcccttcgacaatgccacatgcaagatgagcggcttggtgcagggcatgtctgtgtcggcttccgttttcacactggtggccattgctgtggaaaggttccgctgcatcgtgcaccctttccgcgagaagctgaccctgcggaaggcgctcgtcaccatcgccgtcatctgggccctggcgctgctcatcatgtgtccctcggccgtcacgctgaccgtcacccgtgaggagcaccacttcatggtggacgcccgcaaccgctcctaccctctctactcctgctgggaggcctggcccgagaagggcatgcgcagggtctacaccactgtgctcttctcgcacatctacctggcgccgctggcgctcatcgtggtcatgtacgcccgcatcgcgcgcaagctctgccaggccccgggcccggcccccgggggcgaggaggctgcggacccgcgagcatcgcggcgcagagcgcgcgtggtgcacatgctggtcatggtggcgctgttcttcacgctgtcctggctgccgctctgggcgctgctgctgctcatcgactacgggcagctcagcgcgccgcagctgcacctggtcaccgtctacgccttccccttcgcgcactggctggccttcttcaacagcagcgccaaccccatcatctacggctacttcaacgagaacttccgccgcggcttccaggccgccttccgcgcccgcctctgcccgcgcccgtcggggagccacaaggaggcctactccgagcggcccggcgggcttctgcacaggcgggtcttcgtggtggtgcggcccagcgactccgggctgccctctgagtcgggccctagcagtggggcccccaggcccggccgcctcccgctgcggaatgggcgggtggctcaccacggcttgcccagggaagggcctggctgctcccacctgcccctcaccattccagcctgggatatctga

SEQ ID NO: 658 - protein, 430 aa, Homo sapiens
MEGEPSQPPNSSWPLSQNGTNTEATPATNLTFSSYYQHTSPVAAMFIVAYALIFLLCMVGNTLVCFIVLKNRHMHTVTNMFILNLAVSDLLVGIFCMPTTLVDNLITGWPFDNATCKMSGLVQGMSVSASVFTLVAIAVERFRCIVHPFREKLTLRKALVTIAVIWALALLIMCPSAVTLTVTREEHHFMVDARNRSYPLYSCWEAWPEKGMRRVYTTVLFSHIYLAPLALIVVMYARIARKLCQAPGPAPGGEEAADPRASRRRARVVHMLVMVALFFTLSWLPLWALLLLIDYGQLSAPQLHLVTVYAFPFAHWLAFFNSSANPIIYGYFNENFRRGFQAAFRARLCPRPSGSHKEAYSERPGGLLHRRVFVVVRPSDSGLPSESGPSSGAPRPGRLPLRNGRVAHHGLPREGPGCSHLPLTIPAWDI

SEQ ID NO: 659 - DNA, 1413 bp, Homo sapiens
agatactgatactttctttccaaacagcataagaagtgattgagccacaagtatactgaaggaagggctccctcgagttgtggtgtgaagagataaatcaccagtcacagactatgcacccgactgctgctgttcagtccagggaaaatgaaagttggagtgctgtggctcatttctttcttcaccttcactgacggccacggtggcttcctggggaaaaatgatgacatcaaaacaaaaaaagaactcattgtgaataagaaaaaacatctaggcccagtcgaagaatatcagctgctgcttcaggtgacctatagagattccaaggagaaaagagatttgagaaattttctgaagctcttgaagcctccattattatggtcacatgggctaattagaattatcagagcaaaggctaccacagactgcaacagcctgaatggagtcctgcagtgtacctgtgaagacagctacacctggtttcctccctcatgccttgatccccagaactgctaccttcacacggctggagcactcccaagctgtgaatgtcatctcaacaacctcagccagagtgtcaatttctgtgagagaacaaagatttggggcactttcaaaattaatgaaaggtttacaaatgaccttttgaattcatcttctgctatatactccaaatatgcaaatggaattgaaattcaacttaaaaaagcatatgaaagaattcaaggttttgagtcggttcaggtcacccaatttcgaatgtcactcttgtcgcccaagttggagtgcaatggcacaatctaggctcactgcaaccctgcaacctctgcctaccgggttcaagagattcccctgcctcagcctcccaagtagctggaattacaggcacctgccaccacatccagctaactttttttgtatttttactagagacagggtttcaccatgttggccacactggtctcaaactcctgacctcaggtgatccgcctgcctcggcccccaaagtgctgggattacaggcatgagccaccacatctggcctaggaccttaaatattggaaagcatcctcaaaactgtgggtcagtgagtagaactacaaaacaatagcagtagggcagaaacttgaaagaaggcaggagatcatggtgacagtggatgggaaaaagtgagggttggggataagggttgcgggttgtcgaagggtggattttctccttcagcaactacaggagatatgatgcctcataattcggagccagaagtggggctttgggtgagatatctttgcacagataacatgtatacatcatagttcaaaacccagtagtcattgtttacagcaaataaagaaatatttagtaaattaaaaaaaaaaaaaaaaaaaaaaaaaaaaaaaaaaaaaaaaaaaa

SEQ ID NO: 660 - protein, 218 aa, Homo sapiens
MKVGVLWLISFFTFTDGHGGFLGKNDDIKTKKELIVNKKKHLGPVEEYQLLLQVTYRDSKEKRDLRNFLKLLKPPLLWSHGLIRIIRAKATTDCNSLNGVLQCTCEDSYTWFPPSCLDPQNCYLHTAGALPSCECHLNNLSQSVNFCERTKIWGTFKINERFTNDLLNSSSAIYSKYANGIEIQLKKAYERIQGFESVQVTQFRMSLLSPKLECNGTI

SEQ ID NO: 661 - DNA, 963 bp, Homo sapiens
atgagttcctgcaacttcacacatgccacctttgtgcttattggtatcccaggattagagaaagcccatttctgggttggcttccccctcctttccatgtatgtagtggcaatgtttggaaactgcatcgtggtcttcatcgtaaggacggaacgcagcctgcacgctccgatgtacctctttctctgcatgcttgcagccattgacctggccttatccacatccaccatgcctaagatccttgcccttttctggtttgattcccgagagattagctttgaggcctgtcttacccagatgttctttattcatgccctctcagccattgaatccaccatcctgctggccatggcctttgaccgttatgtggccatctgccacccactgcgccatgctgcagtgctcaacaatacagtaacagcccagattggcatcgtggctgtggtccgcggatccctcttttttttcccactgcctctgctgatcaagcggctggccttctgccactccaatgtcctctcgcactcctattgtgtccaccaggatgtaatgaagttggcctatgcagacactttgcccaatgtggtatatggtcttactgccattctgctggtcatgggcgtggacgtaatgttcatctccttgtcctattttctgataatacgaacggttctgcaactgccttccaagtcagagcgggccaaggcctttggaacctgtgtgtcacacattggtgtggtactcgccttctatgtgccacttattggcctctcagttgtacaccgctttggaaacagccttcatcccattgtgcgtgttgtcatgggtgacatctacctgctgctgcctcctgtcatcaatcccatcatctatggtgccaaaaccaaacagatcagaacacgggtgctggctatgttcaagatcagctgtgacaaggacttgcaggctgtgggaggcaagtga

SEQ ID NO: 662 - protein, 320 aa, Homo sapiens
MSSCNFTHATFVLIGIPGLEKAHFWVGFPLLSMYVVAMFGNCIVVFIVRTERSLHAPMYLFLCMLAAIDLALSTSTMPKILALFWFDSREISFEACLTQMFFIHALSAIESTILLAMAFDRYVAICHPLRHAAVLNNTVTAQIGIVAVVRGSLFFFPLPLLIKRLAFCHSNVLSHSYCVHQDVMKLAYADTLPNVVYGLTAILLVMGVDVMFISLSYFLIIRTVLQLPSKSERAKAFGTCVSHIGVVLAFYVPLIGLSVVHRFGNSLHPIVRVVMGDIYLLLPPVINPIIYGAKTKQIRTRVLAMFKISCDKDLQAVGGK

SEQ ID NO: 663 - DNA, 3070 bp, Homo sapiens
acttttttcatgttctccttgagtgaaggatgaggaaattgaaagcagagtatgcaccttttattaggagattcaaactgcatcctactggattagcctcaaaagtcctaaaatacaaagacatccatctgacagatcactgaggggaggacttgtttttctgttttagaatagtttccgattaaactttttagctcaagaagaaaagaagctagttatttctcacccaggagtggatttgtggtttggcttcaccatggcttcctgccgtgcctggaaccttagggtgctggtggctgtcgtgtgtggactactgactggcatcattttgggactgggcatctggaggattgtgatcaggatccaaagaggaaaatctacttcctcatcaagcacccctacagagttctgcaggaatggtggaacctgggaaaatggcagatgtatttgtacagaagagtggaaaggactgagatgtacaattgctaatttttgtgaaaatagtacctatatgggttttacttttgccagaatcccagtgggcagatatggaccatccttgcaaacatgtggcaaggatactccaaatgcgggcaatccaatggcagtccggttgtgcagtctctctctatatggagagatagaattacaaaaagtgacaataggaaattgcaatgaaaatctggaaaccctggaaaagcaggtagaggatgtcacagcaccacttaataacatttcttctgaagtccagattttaacatctgatgccaataaattaactgctgagaacatcactagtgctacgcgagtggttggacagatattcaacacttccagaaatgcttcacctgaggcaaagaaagttgccatagtaacagtgagtcaactcctagatgccagtgaagatgcttttcaaagagttgctgctactgctaatgatgatgcccttacaacgcttattgagcaaatggagacttattccttgtctttgggtaatcaatcagtggtggaacctaacatagcaatacagtcagcaaatttctcttcagaaaatgcggtggggccttcaaatgttcgcttctctgtgcagaaaggagctagcagttctctagtttctagttcaacatttatacatacaaatgtggatggccttaacccagatgcacagactgagcttcaggtcttgcttaatatgacgaaaaattacaccaagacatgcggctttgtagtttatcaaaatgacaagcttttccaatcaaaaacttttacagctaaatcggattttagtcaaaaaattatctcaagcaaaactgatgaaaatgagcaagatcagagtgcttctgttgacatggtctttagtccaaagtacaaccaaaaagaatttcaactctattcctatgcctgtgtctattggaatttgtcagcgaaggactgggacacatatggctgtcaaaaagacaagggcactgatggattcctgcgctgccgctgcaaccatactactaattttgctgtattaatgactttcaaaaaggattatcaatatcccaaatcacttgacatattatccaacgttggatgtgcactgtctgttactggtctggctctcacagttatatttcagattgtcaccaggaaagtcagaaaaacctcagtaacctgggttttggtcaatctgtgcatatcaatgttgattttcaacctcctctttgtgtttggaattgaaaactccaataagaacttgcagacaagtgatggtgacatcaataatattgactttgacaataatgacatacccaggacagacaccattaacatcccgaatcccatgtgcactgcgattgccgccttactgcactattttctgttagtgacatttacctggaacgcactcagcgctgcacagctctattaccttctaataaggaccatgaagcctcttcctcggcatttcattcttttcatctcattaattggatggggagtcccagctatagtagtggctataacagtgggagttatttattctcagaatggaaataatccacagtgggaattagactaccggcaagagaaaatctgctggctggcaattccagaacccaatggtgttataaaaagtccgctgttgtggtcattcatcgtacctgtaaccattatcctcatcagcaatgttgttatgtttattacaatctcgatcaaagtgctgtggaagaataaccagaacctgacaagcacaaaaaaagtttcatccatgaagaagattgttagcacattatctgttgcagttgtttttggaattacctggattctagcatacctgatgctagttaatgatgatagcatcaggatcgtcttcagctacatattctgccttttcaacactacacagggattgcaaatttttatcctgtacactgttagaacaaaagtcttccagagtgaagcttccaaagtgttgatgttgctatcgtctattgggagaaggaagtcattgccttcagtgacgcggccgaggctgcgtgtaaagatgtataatttcctcaggtcattgccaaccttacatgaacgctttaggctactggaaacctctccgagtactgaggaaatcacactctctgaaagtgacaatgcaaaggaaagcatctagacagtaaaacttacctgttgtggtctttttaatcacctcgtttgagttttatctgtttctctcctttatttcccagtcctctcagaaagtcttcctcaatgtattttgctcaggattaagaattagataaaacctgttgtttattattattcggcataatggacttggtagtttttctatttttcaatagatttgtacttgaataaggtgaagaatttcacacaacatacaagagtaccattgttccttatatcgttaaatctttgtgacacactttgacaaaaatgtagaacctataacaaattcttttacaagttactataaaggacacaaagagaaaactttaccttccagaacaaaatgactcctgatgaacagtgtgtggggatttgcttgtatgtattaaacttttgacctctg

SEQ ID NO: 664 - protein, 797 aa, Homo sapiens
MASCRAWNLRVLVAVVCGLLTGIILGLGIWRIVIRIQRGKSTSSSSTPTEFCRNGGTWENGRCICTEEWKGLRCTIANFCENSTYMGFTFARIPVGRYGPSLQTCGKDTPNAGNPMAVRLCSLSLYGEIELQKVTIGNCNENLETLEKQVEDVTAPLNNISSEVQILTSDANKLTAENITSATRVVGQIFNTSRNASPEAKKVAIVTVSQLLDASEDAFQRVAATANDDALTTLIEQMETYSLSLGNQSVVEPNIAIQSANFSSENAVGPSNVRFSVQKGASSSLVSSSTFIHTNVDGLNPDAQTELQVLLNMTKNYTKTCGFVVYQNDKLFQSKTFTAKSDFSQKIISSKTDENEQDQSASVDMVFSPKYNQKEFQLYSYACVYWNLSAKDWDTYGCQKDKGTDGFLRCRCNHTTNFAVLMTFKKDYQYPKSLDILSNVGCALSVTGLALTVIFQIVTRKVRKTSVTWVLVNLCISMLIFNLLFVFGIENSNKNLQTSDGDINNIDFDNNDIPRTDTINIPNPMCTAIAALLHYFLLVTFTWNALSAAQLYYLLIRTMKPLPRHFILFISLIGWGVPAIVVAITVGVIYSQNGNNPQWELDYRQEKICWLAIPEPNGVIKSPLLWSFIVPVTIILISNVVMFITISIKVLWKNNQNLTSTKKVSSMKKIVSTLSVAVVFGITWILAYLMLVNDDSIRIVFSYIFCLFNTTQGLQIFILYTVRTKVFQSEASKVLMLLSSIGRRKSLPSVTRPRLRVKMYNFLRSLPTLHERFRLLETSPSTEEITLSESDNAKESI

SEQ ID NO: 665 - DNA, 1330 bp, Homo sapiens
cggccgccggcagggttcgcgaggcacccacgctcctaaaaagagcacgacgcacccgatgctcggattggatgaagtgcaaagctttaatccctggaaaggccacgaacaatgaatccatttcatgcatcttgttggaacacctctgccgaacttttaaacaaatcctggaataaagagtttgcttatcaaactgccagtgtggtggatacagtcatcctcccttccatgattgggattatctgttcaacagggctggttggcaacatcctcattgtattcactataataagatccaggaaaaaaacagtccctgacatctatatctgcaacctggctgtggctgatttggtccacatagttggaatgccttttcttattcaccaatgggcccgagggggagagtgggtgtttggggggcctctctgcaccatcatcacatccctggatacttgtaaccaatttgcctgtagtgccatcatgactgtaatgagtgtggacaggtactttgccctcgtccaaccatttcgactgacacgttggagaacaaggtacaagaccatccggatcaatttgggcctttgggcagcttcctttatcctggcattgcctgtctgggtctactcgaaggtcatcaaatttaaagacggtgttgagagttgtgcttttgatttgacatcccctgacgatgtactctggtatacactttatttgacgataacaactttttttttccctctacccttgattttggtgtgctatattttaattttatgctatacttgggagatgtatcaacagaataaggatgccagatgctgcaatcccagtgtaccaaaacagaragtgatgaagttgacaaagatggtgctggtgctggtggtagtctttatcctgagtgctgccccttatcatgtgatacaactggtgaacttacagatggaacagcccacactggccttctatgtgggttattacctctccatctgtctcagctatgccagcagcagcattaacccttttctctacatcctgctgagtggaaatttccagaaacgtctgcctcaaatccaaagaagagcgactgagaaggaaatcaacaatatgggaaacactctgaaatcacacttttaggaaagtacatggatcaccatgagtctagacatgattgtctatcttactggtattattagaaagggcaggtgtaccgatatgtttatgcccattcttcttgtgtacttgtgactcttagcagcatggaagagaagtgtaaccatgcaaatacaatgagcttaatatgctaactgtaaaaaaaaaaaaaaaaaaaaaa

SEQ ID NO: 666 - protein, 340 aa, Homo sapiens
  MISC_FEATURE (245)..(245): Unknown Amino Acid
MNPFHASCWNTSAELLNKSWNKEFAYQTASVVDTVILPSMIGIICSTGLVGNILIVFTIIRSRKKTVPDIYICNLAVADLVHIVGMPFLIHQWARGGEWVFGGPLCTIITSLDTCNQFACSAIMTVMSVDRYFALVQPFRLTRWRTRYKTIRINLGLWAASFILALPVWVYSKVIKFKDGVESCAFDLTSPDDVLWYTLYLTITTFFFPLPLILVCYILILCYTWEMYQQNKDARCCNPSVPKQXVMKLTKMVLVLVVVFILSAAPYHVIQLVNLQMEQPTLAFYVGYYLSICLSYASSSINPFLYILLSGNFQKRLPQIQRRATEKEINNMGNTLKSHF

SEQ ID NO: 667 - DNA, 1372 bp, Homo sapiens
ccacacacacaggacccgcatcctgggtgatgaagtcagacacgcagcagctgggtgagtgctaacgctcagataagcatctgtgccattgtggggactccctgggctgctctgcacccggacacttgctctgtccccgccatgtacaacgggtcgtgctgccgcatcgagggggacaccatctcccaggtgatgccgccgctgctcattgtggcctttgtgctgggcgcactaggcaatggggtcgccctgtgtggtttctgcttccacatgaagacctggaagcccagcactgtttaccttttcaatttggccgtggctgatttcctccttatgatctgcctgccttttcggacagactattacctcagacgtagacactgggcttttggggacattccctgccgagtggggctcttcacgttggccatgaacagggccgggagcatcgtgttccttacggtggtggctgcggacaggtatttcaaagtggtccacccccaccacgcggtgaacactatctccacccgggtggcggctggcatcgtctgcaccctgtgggccctggtcatcctgggaacagtgtatcttttgctggagaaccatctctgcgtgcaagagacggccgtctcctgtgagagcttcatcatggagtcggccaatggctggcatgacatcatgttccagctggagttctttatgcccctcggcatcatcttattttgctccttcaagattgtttggagcctgaggcggaggcagcagctggccagacaggctcggatgaagaaggcgacccggttcatcatggtggtggcaattgtgttcatcacatgctacctgcccagcgtgtctgctagactctatttcctctggacggtgccctcgagtgcctgcgatccctctgtccatggggccctgcacataaccctcagcttcacctacatgaacagcatgctggatcccctggtgtattatttttcaagcccctcctttcccaaattctacaacaagctcaaaatctgcagtctgaaacccaagcagccaggacactcaaaaacacaaaggccggaagagatgccaatttcgaacctcggtcgcaggagttgcatcagtgtggcaaatagtttccaaagccagtctgatgggcaatgggatccccacattgttgagtggcactgaacaagcagaccaacaacactgaggaagatagagtggtgacttagaattaactcgtgctaaggggtcgggggctttgaaaatgccacccccctttcttattgcaagacggcttctcgcacatgaactgcatccttctcattctgtcggaaatgaaattcacacaactataccttttggggaggttccagtt

SEQ ID NO: 668 - protein, 346 aa, Homo sapiens
MYNGSCCRIEGDTISQVMPPLLIVAFVLGALGNGVALCGFCFHMKTWKPSTVYLFNLAVADFLLMICLPFRTDYYLRRRHWAFGDIPCRVGLFTLAMNRAGSIVFLTVVAADRYFKVVHPHHAVNTISTRVAAGIVCTLWALVILGTVYLLLENHLCVQETAVSCESFIMESANGWHDIMFQLEFFMPLGIILFCSFKIVWSLRRRQQLARQARMKKATRFIMVVAIVFITCYLPSVSARLYFLWTVPSSACDPSVHGALHITLSFTYMNSMLDPLVYYFSSPSFPKFYNKLKICSLKPKQPGHSKTQRPEEMPISNLGRRSCISVANSFQSQSDGQWDPHIVEWH

SEQ ID NO: 669 - DNA, 2894 bp, Homo sapiens
gtcatggagtgtctgcacgggacgtcctggagagtcggacacgtaagcagcacagtgaggccaccaacagcagcaaccgagtcttcgtgtactgcgccttcctggacttcagctccggagaaggggtctggtcgaaccacggctgtgcgctcacgagaggaaacctcacctactccgtctgccgctgcactcacctcaccaactttgccatcctcatgcaggtggtcccgctggaggtcaacattggcatcctcatcgctgtgaccagagtcatctcacagatcagcgccgacaactacaagatccatggagaccccagtgccttcaagttgacggccaaggcagtggccgtgctgctgcccatcctgggtacctcgtgggtctttggcgtgcttgctgtcaacggttgtgctgtggttttccagtacatgtttgccacgctcaactccctgcagggactgttcatattcctctttcattgtctcctgaattcagaggtgagagccgccttcaagcacaaaaccaaggtctggtcgctcacgagcagctccgcccgcacctccaacgcgaagcccttccactcggacctcatgaatgggacccggccaggcatggcctccaccaagctcagcccttgggacaagagcagccactctgcccaccgcgtcgacctgtcagccgtgtgagccgggaggctgccaaccaggccaggctgcgctcagaacacacccccccaaacagaatgaaatgccccacctttgcccatggaccctctccttgctgctgtctggacatgggtgttgtggccccgagacagctgtcctcccctgtgactctggctgtcggagcacactgctcagcccagcagcctgatgcccaggccagcgtgggccctcctgccttgcatccacccgtgggctgagtgacttcctcgggggattcccaggacacagtggcctgactgtgatggtgcccttgagcctcccttcatcactcagcatcagacccagcgaggccaggacactcggggccggtcccgcagcaccaggaggggatgttcagcctctgtgccttggtggggcttggggactcagggccaaagaggtggttcaggtccccacgcaccctcagtcaggcgcaggcagctgggggtgtgtggggaagagcatgcggagtccccagtgtctgaatccactgagtggtgagttccccacagccggcgctagccgtggtgtgtgtctctgtaggtggtgccggcgtgggccaacctgtgctgtgtcatcagttgggggcccctgcccaagccgagctcgagccgtgggcgggagtcgttgactctccaggtgagggcgacccctctgccctgtccttgcgggggtcccctctgctcacgtgaagagccgctctgggccttgaggctgcctgatggtgcctgtgcttgggggagcttctcggccatccgctgtgagttttgcctctttggaccccaattcggccttaagatgccctcctccctcgtgtgccagcctccttggttgttcttgggccacaggagctggccgtgtccccgcagtgcctggtgtccaggtggaaagtggagggcattttccagggcactgctttccccagaggcttcctcatggctcacaggcactctacgaagtttctaatgggcagaccacgcggcaggtagcacagtgcgctccgtctggtcaccatgagaccgacctgcgctgagtccccactgacctggagagggagggctggtgacagccgtgtcttctgtgttgagggaaatttatggactcagactcagccccagaggagatgggataattgttatggacccatgtgtgggcatgatcctgtggaacacaggtttgggatcatagatgtgaattaagacaccaccgagatacgggctgtgaggttcatactgtgctgatagcactcgtggtgtctgtgaaatgtgggtaagacattcaaacctggttttgatactggaaactcttcctttaaaactgtgaccatgatttcattcagcccctccacacccctatgtctgccttgtttcagagtgagttttctatggagcctgtggcccttttgcagcccacctggtggcttcttaatgtaactcttcccctggtcgcctggagtggaccactcatctgcaggcctctcctgcatggggagggtaggcagggagcagcatgtctgcaggggtgaacctttgctcttctgtcaggcgaggcccaggctgcaccagccacctgccacatggtgacagtgccacgggccctgcgtatggcccctgcaaccgtgctctggcgggcacacctggctgctgcaggccaaggccgctgttcagtgaagagtcccatgtttagtatggactaaagtcccatgtttagccactgccccaggctcccgtgaccccagaaaccaggtcacatggaccacagtgccagatcctcatcacgccggtgagcacctagaagtgagaacactgtattcctacaatgtacacttggatatttctccttatttagtttctagtgaaacaaatcaagtaaggaactatctttagtttagatggaattatttgtttttaattgttgccgtattcatctatatagctaatatttcaagataagtaatgaacaaaacctgtctaaaccttttgtttccaatgaatgaaagtcatgcactttatttataggctctatgttttggcttctgcagtacttttattatctatacataatttggccaaaaataagaaattggaaagaatgaaatgtttagtttatagtagaagaaagatgatgacactaagttgtgaaaatatgttgtgatttttatgaaataaactcatgtcctgaaaaaaaaaa

SEQ ID NO: 670 - protein, 227 aa, Homo sapiens
HGVSARDVLESRTRKQHSEATNSSNRVFVYCAFLDFSSGEGVWSNHGCALTRGNLTYSVCRCTHLTNFAILMQVVPLEVNIGILIAVTRVISQISADNYKIHGDPSAFKLTAKAVAVLLPILGTSWVFGVLAVNGCAVVFQYMFATLNSLQGLFIFLFHCLLNSEVRAAFKHKTKVWSLTSSSARTSNAKPFHSDLMNGTRPGMASTKLSPWDKSSHSAHRVDLSAV

SEQ ID NO: 671 - DNA, 1038 bp, Homo sapiens
ttagttcaagtccaggtcgacactgctttggctgcttgggtggtaggcaatgctggggccgggactgtcccgggaggctcttccccacagcccctgcaggcacctttgggcggctgccctccagggggctgtgtagcgctgatcgcccagccccatggctacgggcactgccgctgcactggcacttcctagggagaggagggacaacagtgtcccaggccccagtggcgggcgctgctcataggccaggactgagaggagcagtgtggccacgtagggcccccagcacagcccgaagagcagcatggctccagcctgtgcccttgcctgcctccaggtaagggcccgggccagggcggagggctcatcgcggcacactgcccgctccagccggcagatgtcctgcagctggcggtgggcagtggccagcacgcggacagagaggaaggcagcagcacccacggcgggcagcaggagcccatagacttcgaggtacaggtagggggctgggaagatagcctgggagctgcagttggcaccaggggtccagtggttccaccccagagcgggcagactggcaaagagcaggggaccagcccaggtgaggagcagggccagccgaatgctcccagggggctggagtggcctcaggactgccatgtagcgctccccgtgcaccagcaagaggttggcaagcagggagaggaaggagaagttgggagccaagtagacgaggaggcaggaccagtaaccccggcgactctggttccacagccctggcaatgtgggcaatgccagacccgtgagcagcccagccagcagtaggctcaggaagaagcagccagcaggtgggctgcgcaggcggcggtcccaggcgatgcccagggctaggagcaggttcgcggtgatgatgaggcttgccagggccagggagagccccaaagcccccttgggaatggggctgggcacctcgccagtgctgttgggcgtcatcttggtcctggggacaggggagtcctggagcggcagccggcatgc

SEQ ID NO: 672 - protein, 377 aa, Homo sapiens
QDTRHGPNRCRAGCSNSLTLRKAQAGQAIPAPNSHACRLPLQDSPVPRTKMTPNSTGEVPSPIPKGALGLSLALASLIITANLLLALGIAGTAACAATCWLLLPEPTAGWAAHGSGIATLPGLWNQSRRGYWSCLLVYLAPNFSFLSLLANLLLVHGERYMAVLRPLQPPGSIRLALLLTWAGPLLFASLPALGWNHWTPGANCSSQAIFPAPYLYLEVYGLLLPAVGAAAFLSVRVLATAHRQLQDICRLERAVCRDEPSALARALTWRQARAQAGAMLLFGLCWGPYVATLLLSVLAYEQRPPLGPGTLLSLLSLGSASAAAVPVAMGLGDQRYTAPWRQPPKGACRGCGEEPPGTVPAPALPTTQAAKAVSTWT

SEQ ID NO: 673 - DNA, 1400 bp, Homo sapiens
tcaggcccaggatagagtaatcatcgggtccacagcactggctagatgagtgggggtgttttgatcctaatgttattcccatgttagcacagaacttgtgtggcagtagagagaggtcaggcttcagagtcagcaagaactggatttcaaactggatttgaggacccccaccttttgataggtgacttattctctgtgagtctctgatctgccctctttaaatgaggaagtaaatcccacatggcagggtggtggggagaatcagagatcatacagctggtgatcacaactggtttctgtttccagggtcaccagactggggtttctgagcatggattcaaccatcccagtcttgggtacagaactgacaccaatcaacggacgtgaggagactccttgctacaagcagaccctgagcttcacggggctgacgtgcatcgtttcccttgtcgcgctgacaggaaacgcggttgtgctctggctcctgggctgccgcatgcgcaggaacgctgtctccatctacatcctcaacctggtcgcggccgacttcctcttccttagcggccacattatatgttcgccgttacgcctcatcaatatccgccatcccatctccaaaatcctcagtcctgtgatgacctttccctactttataggcctaagcatgctgagcgccatcagcaccgagcgctgcctgtccatcctgtggcccatctggtaccactgccgccgccccagatacctgtcatcggtcatgtgtgtcctgctctgggccctgtccctgctgcggagtatcctggagtggatgttctgtgacttcctgtttagtggtgctgattctgtttggtgtgaaacgtcagatttcattacaatcgcgtggctggtttttttatgtgtggttctctgtgggtccagcctggtcctgctggtcaggattctctgtggatcccggaagatgccgctgaccaggctgtacgtgaccatcctcctcacagtgctggtcttcctcctctgtggcctgccctttggcattcagtgggccctgttttccaggatccacctggattggaaagtcttattttgtcatgtgcatctagtttccattttcctgtccgctcttaacagcagtgccaaccccatcatttacttcttcgtgggctcctttaggcagcgtcaaaataggcagaacctgaagctggttctccagagggctctgcaggacacgcctgaggtggatgaaggtggagggtggcttcctcaggaaaccctggagctgtcgggaagcagattggagcagtgaggaagaacctctgccctgtcagacaggactttgagagcaatgctgccctgccacccttgacaattatatgcatttttcttagccttctgcctcagaaatg

SEQ ID NO: 674 - protein, 322 aa, Homo sapiens
MDSTIPVLGTELTPINGREETPCYKQTLSFTGLTCIVSLVALTGNAVVLWLLGCRMRRNAVSIYILNLVAADFLFLSGHIICSPLRLINIRHPISKILSPVMTFPYFIGLSMLSAISTERCLSILWPIWYHCRRPRYLSSVMCVLLWALSLLRSILEWMFCDFLFSGADSVWCETSDFITIAWLVFLCVVLCGSSLVLLVRILCGSRKMPLTRLYVTILLTVLVFLLCGLPFGIQWALFSRIHLDWKVLFCHVHLVSIFLSALNSSANPIIYFFVGSFRQRQNRQNLKLVLQRALQDTPEVDEGGGWLPQETLELSGSRLEQ

SEQ ID NO: 675 - DNA, 8577 bp, Homo sapiens
  misc_feature (6021)..(6120): Unknown nucleotides
tcaggtggagccgcagcgcctcgtgtagtcctgaatggaggcctggaagtgctctgtgctgttgaggtctgggcggcagaggatcacgtagcacttaggcagaaaatacccaccgaagccgctgctcaggctgctcagcccagccatcatgttggccgcaggcaggtacttgccgtcgtagacgctggccgtggtgaagaaggcgatccaggacacgaagttgaagagcaggctgaaggtgacacatttggcctcgttgtagttctctggcaagtccttacccaggtagctgcaggcaaaggcactgatggagaggaggccattgtagaggaaggccagtatgaagcccagggagttggtctctgtgcactcaagcatcaccagatgggggaagcgctggtattccctagcaggcagtggggtccacaccaccagccaagttagacagataagcagctgggccgctgagctgatcatcacaaacaggccagcaccgtggttttggacccaggcgtggtagaatgtaggtaccttggtggaaaacttgaagatgatgattagttggaatgagcgaactgtcaggcaggacaggaagatggtgaaaccaagggcaaagagggcctggcgtagcaagcacgcaggccttgtgggttccccaaagaagccatagaggctgccactacctgctgccagggagcccagcataagaaagcacaggcggccccctgctgacctcaccacaggggtgtctaggtgccaggcaaacaggccagcagtcccaagcagcagcagcagcagcagcgtgttagctgccagcagcacccaagaggtgtgctcacgcaaagccaaaaacaccacagtgcgcgggaagcaggtctggcttccctcaggtgcccactcttctttcccacaaggctggcatctgtagaggtctgaaagggaaggccaagaaggttcctgagagccagatgagcagagtaggaataggaaataggggcctgcaagatactgggagaattgtaccagggcagctagactatactaggcatagtgggatgggggtagccgggagtggggcctgaggccacgcatttcctcaaaatgcctgtgttaattacagactctggagacacacaggtcggttctgtatggctcatgatcccatgagggttttgcaaaccctagggaggaccttaacctggtagctctgcccacataccagagaggttacgatctgatgggagcagcctgctcccaagggagggcattgtaacccctctctcttgccagcatttccatgaaccactttcctgagctgctgctctgtggtttctctgagtcctgaccctctgaggacagaagggaagtattcctgtccctacagagatggtgaaaggaaagaatgtggcccctggacaccaactaaggacctgagtccttagctacctaatttgctctctgttcttgaccttgcatttctggatggggaatgctgtttttttctctgctgcagacacgctagtatctgtattcaggccaagctgttcaaggagctagctgtctttggcatgggcaacagaagggacagtaggacaagagggcacaaagggaacaatagctatattcatttagagaaagaggttgaattcaggatacgactgcttttgtaggagttgtgatgacagctctctaacagaggacacacctcagtctaaggctttcagttggctaattctttctttctttctttttttttgagacagagtttttctcttgtcgcccaggctggagtgcaatggtgcaatcttggctcactgcaacctccgcctcccgggttcaagcaattctcctgcctcagcctcccgagtagctggaattacaggcacacgccacaacgcccggctaactttttttgtatttttagtagagatggggtttcaccatgttggtcaggctggtctcgaactcctgacctcaggtgatccacccacctcggcctcccaaagtgctgggattacaggtgtgagccaccgcgcccggcctcctttctttttttggggggacgaattctcgctttgtggtccaggctggaatgcatcttggctcactgcaacctccgcctcctgggttcaagtgattctcctgcctcagcctcccgagtagctgggattacaggcacgcgccaccacacccagctaattttttatatttttggtagagatggggtttcaccatgttggccaggctggtctcgaactcccgacctcaagtgatccacccgcctcagcctcccaaagtgctgggattacaggcatgagccaccgcacccagtggctgattctcttgatcagaattctgtctggtagcaggtgtcctccaacctgaagctaactggcagcccagtgactgggccttggttctggggcagggcacatggggcccaagggaggccctccctccaccgtgcagcccccgggagtgctgggtagctcgcctgctccattgcccactcaccactcttgttgaggaaggtcccagccccacagggcacacactcaaagcagcagtgatggaaacccgtaaccactcgctggtgcccttcaagacagtcgctggaacacacagacttaggcacctgtaagaagccagaggggccacacgtaggggcccaagtcaaaggacagctcacatgtggaacagaaaacagaatctctgtgcatctgccctcagggctcactcccagggcagggcccctggtcgtgtgaacttccgccccagggcatctgcacactcgcctacggagtgtcttccctgcttccctggccaggatgggtagagtggtggcagctggacccctggggcccccctcctgctccctgtacactgtgtcagcatcacccccaggctctaggttgcccataagccagttacatggtgagtagccacatccccattacctggttgtcctttccgtgccactggattttggtctcatttatgtttagctgaactggagaccatgtggaggaaccgaggaccgtgaaggtccacttgggtccattccagtcccaggcaattatgttatagctactgaggggatctctgttgtcattaaacgccacagtgtccttgtgtagaaggaaatgcaccttgtggatctgctccaaaagctgaaagaaacgcgtatcatgaagccaccacagacagcacagacccacatggtcccagaagcaagggcctggggccttcctgggtttccgtcctggtggtttcagcccatcaggaaggtctcgtcccttccttcttaggaagcccctcaatcttccccaccaacctcctgagaggaggcctctaacaaacactcctttacagacagttttagccctggatcttatcacttgacacttccaagacacagtgggtgagagaaggcaaggatcagagagaaagatctgtctaagagaagagagctaatgcctgtaatcccagcactttgggaggccgaagcaggaggatcacttgatgccaggagttcgagaccagcctggccaacatggtgaaaccccatctctactaaaaatacaaaaattaggccgggtgcggtggctcacgcctgtaatcccagcactttgggaggacgaggtgggcggatgacaaggtcaggagattgagaccatcctggctaacatggtgaaaccccgtctctactcaaaatacaaaaaaaattagctgggcgtggtggcgggcgcccgtagtcccacctacttgggaggctgaggcaggggaatggagtgaacctgggaggcggagctcacagtgagccaagatcgcaccactgcattccagcctgggcaacagagcgagactctatctcaaaaaaaaaaaaaagaaaagaaaaattatccaggcatggtggtgggtgcctgtaatcccagctactcaggaggccgaggcaagagaatcacttgaacccaggaggtggaagttgcagagagccgagatcgcatcactacactgcagcctgggtgacagagccagactgtctcaaaaaacaaaacaaaacaaaacaaaaaacctcaagttagtggcatttatcccccttggcatttagagtgaccggagagtgcccactctgctcatctcaggattggctgttctccctgacaggaggtgctggggtgggctctcttacctgccaggggtagactcggcccctggaacaagctccagaggcacagcccaggagctggtggaggccatgggccaccgcatacacagcccggtatgcgttgtaggcagaactcatggagaaggctttgagcttgggcatcgtgtgtgccatgaaagcttggcattctctgcagagctgattgctgctgcaccaggagcccttgtggcaaggcctaggggccttcttgtctgcccgggcataggcttcttcaaacgccttcaggccagggacagccctcttctggatggccacgcccagcaccatcccaatgcgctggatcccgggcaccccagtgatgtgcctggagagggcccaggcttctgaggcgacccacaccttgccagtcaggttggtcagcaccacggactcgaaaaacaccctggccaactgccggctggaaaaaacaaccacgacggtggccccggcctgggccaggtggcgcatgaggcactgcatcctctcatcgcccacctgggcagagaagggcatgatgtccttgaaagcaatgcagatcccctgaccagtggcctggttctccagtgcctgcacccctagctgcccatagtcgtcactgctgccaaccagagagatccaggtccacccgaacttctgcagcagcagcaccatggtctccacctggtacttgtcattggggatggtgcgcaggaaagagggatactgccgcttcacgctgagcgtctcgctgctggccgcatagctaatctatgggaggtcccgttcagccatttcagtctccactgaaggcccccccagtgcctggccctgtgctgggtgtggggatacagggagccggggagaccaggagagcacccctcagcctgtgaaactgacaaatcacctgcgaaggctccactggggcaggttctgggggaggggtgggaatctgcctggggacaaggggtgaggggatgcattccaagcaaaggagacaaaacctgcataggagtgaaatagtcccgtgtgtttggggaccttcagggacttccactggaggcagtttgcaaggaagaagagaagcatgtgtaggtcagggcagaagttaggtcagtggcctgttaggaaccgggcctcacaggaggaggtgagcagctggtgagtaagcgaagcttcatctgtatttacagctgctcccctcctgtcagatcagcagcagcatcagattcttgtaggagcttgaaccctactgtgaactgcacatgcgagggatctgggttgcacgctacttatgagaatctaatgtctgatgatctgtcactgtctcccatcacccccagatgggaccatctagttgtaggaaaacaagctcagggctcccactgattctacattatggtgagttgtataattattttattatattaatacattatggccgggtgcagtggctcacacctgtaatcccagcacattgggaggccgaggtgggtggatcacgaggttaggagtttgcgaccagcctggctaacacggtgaaaccccgtctctactaaaaatacaaaaaaattagccgggcatggtggcgcgcgcctgtagtcccagctacacgggaggctgaggcaggagaatggcgtgaacccgggaggcggagcttgcagtgagtcgagatcgcgccactgcactccagcctgggcgacagagcgaaactccgtctcaaaaaataaaaataaaaataaaaataaataaataaatgaatgtaatgccacttgaatcatcctgaaaccaacccctcacacacccttccttagaaaaattgtctttcacgaaaccannnnnnnnnnnnnnnnnnnnnnnnnnnnnnnnnnnnnnnnnnnnnnnnnnnnnnnnnnnnnnnnnnnnnnnnnnnnnnnnnnnnnnnnnnnnnnnnnnnnccactgctgtaagccacagggagtccctaaggatgtccgcagagaagtgctatgttcggacttgcattttttcttttctttctgagacagagtcttgctctgtcgcccaggatggagtgcggtggcgtgatcttggctcactgcaacccctgcctcctgggttcaagaaattctcctgcctcagcctcctgagtagctgggattacaggtgcctgccaccacgcctggctaatttttgcatttttagcagagacagggtttcaccacgttggccaggctggtttccaactcctgacctcatgagctgcccaccttagcctcccaaagtgctgggattacaggcgtgagcccccgcgcccggtgcccggccgggacttgcatttcatgagcgtatctctgacttcagtgaggaatgagttagaagaaatttaagactaaaatcagggggaagccttaggacactgatgggagaatctagctgaggggtgatgctggtgtgaattccagctgtggctgtggcagtggaaaaggaggccagaaaggatgaaaggtggggagcagggcaaggaggagcagcagtgggcaggactccagggtgatggccactccctcactaccctccaccagaggattggggctaatacaggaagaaaagaggcttttgttgtgtagggaggtaaggtcaatctgggccttgctgggtccatgatgtggcaatgttgggccagcatcaggggctcagatcagaggggaggggactgagaatgggaggttaaaccacgagcccacagcctgcctgggaactggaaaaggggaggagaggagggcgaagcctgctccggggaatcacctaccttttcagaggaagtggggcaaaaggagagaagagctgcaagtgaaagccaggtgggggcagggggctgaggggggcataaattccaaggaaagactctcataggaggactggtcaaaaatgtcacaaagggcacggtgcctcatgcctgtaatctcaccactttgggaggccaaggcaggtggattgcttgagcccaggagttcaaggccagtctaggcaacatagtgagacctctatctctacaaaaaatacaaaaattagccaggcatggtggcacatgcctgtggacccagctacttaggagtatgaggtgggaggattgcttgagcctgggagacagtgagacaacattgcaccactgcactccagcctgagtgtcagagtgagactgtgtctcaaaaaaaaaaaaaaaaaaaaatcacaagtcacctaagataaagaaggactgcaaagtaggatttggatacctagaaggtgccccagctcacagcgaaagcaagagtggtggggacagaatcgggctgagggtcaatgagggcagggagaggccagcaggaaactcccatgggaaggggcagggagtcagtgctcagggtagagggcctggaagagggagaggaatgagggcaaccacaggccaggcaggaacccatggggaaggatccataagccaaggaggggctgtggtccaaggtacagggcaagaataagcacagagacaggactgacatcagcaaggtgaggcatgtcagcacctctgagccaggagggaagaaggaaaggcaggcaggagagactgggatgatgtggagcagtctatggggtgggaagcaaagggtgtccttttttggggggaggatggaggggacaaggtatcactctgtcacccaggctggaatgcagtggtgcaatctcagctcactgcaacctccacctcccagattccagcaattctcctgtctcagcctcccaagtagctgggattacaggcacacaccaccactctcagctaacttttgtatttttagtagagatggggtttcgccatactggccaggctggtctcgaactcctggcctcaagagatctgcccagcctccccaagggattacaggcatgagccacagcgcccgtccaggatgtccattcctaacaaaggcaacggaacctctggagggaggagggaagtggagggcagcaggggtacagctgagtggcagtagttcccaaggagaatgggttttcccatgagagtggaggcagggatctggaagcagctctggaaagagaggaaggctggggcaggaaccacgctgggcagggacccctgacttgtgactaaagagcagtgaccacccaagagatccagggggcaggcagccttgggggggacagcagctcttgcccacatgccccagcccagacttgcctgaagggagatgggcaaaggtctgaggctccagcttaccatgggcaccaggaaagggctcagcagggcggctgtggtggcagcacggttggtgctgtcaggcccaatcactgccagcaccgtaggggaatagtggagaaggtctccttggagctctatgtggtgttgccct

SEQ ID NO: 676 - protein, 777 aa, Homo sapiens
RSCSFNEHGYHLFQAMRLGVEEINNSTALLPNITLGYQLYDVCSDSANVYATLRVLSLPGQHHIELQGDLLHYSPTVLAVIGPDSTNRAATTAALLSPFLVHISYAASSETLSVKRQYPSFLRTIPNDKYQVETMVLLLQKFGWTWISLVGSSDDYGQLGVQALENQALVRGICIAFKDIMPFSAQVGDERMQCLMRHLAQAGATVVVVFSSRQLARVFFESVVLTNLTGKVWVASEAWALSRHITGVPGIQRIGMVLGVAIQKRAVPGLKAFEEAYARADKEAPRPCHKGSWCSSNQLCRECQAFMAHTMPKLKAFSMSSAYNAYRAVYAVAHGLHQLLGCASELCSRGRVYPWQLLEQIHKVHFLLHKDTVAFNDNRDPLSSYNIIAWDWNGPKWTFTVLGSSTWSPVQLNINETKIQWHGKNHQVPKSVCSSDCLEGHQRVVTGFHHCCFECVPCGAGTFLNKSELYRCQPCGTEEWAPEGSQTCFPRTVVFLALREHTSWVLLAANTLLLLLLLGTAGLFAWHLDTPVVRSAGGRLCFLMLGSLAAGSGSLYGFFGEPTRPACLLRQALFALGFTIFLSCLTVRSFQLIIIFKFSTKVPTFYHAWVQNHGAGLFVMISSAAQLLICLTWLVVWTPLPAREYQRFPHLVMLECTETNSLGFILAFLYNGLLSISAFACSYLGKDLPENYNEAKCVTFSLLFNFVSWIAFFTTASVYDGKYLPAANMMAGLSSLSSGFGGYFPLKCYVILCRPDLNSTEHFQASIQDYTRRCGST

SEQ ID NO: 677 - DNA, 621 bp, Homo sapiens
gagcaacatgatctttttgaagtacttgacggtgtcgttcttgacggtcacgaagcacagagtgttgatcatgctgttgctcatggcgatgcactcgacgatgtagaaggcagtgaggtagtgcttctccttcacaaacacggtggggaagaagtcgcgcacgatggtgaagccgtagaagggcgcccagcatagcacgtaggcggtgaggatgcacatgagcaccaggaccgtcttcctgcggcagcgcagcctcttgcggatctgctctgtctggaatccagggaccgccttgaaccagagctcccgggagatcctggcatagcacagggtcatggtgaccacggggcccacgaattctatgccaaagataaagaggaagtaggacttgtagtagagctgctggtccacaggccagatctggccgcagaagatcttttcctggctcttgacaatgacgaggaccgtctcggtggtgaagtaggcggaagggatggcgatcaggatggacaccgtccacaccaaggcaatcaggccagtggctgtttggcacttcattcgtggtctcagcggatggacaatagccagatacctagggcaagaacacaagtggaggcagcc

SEQ ID NO: 678 - protein, 389 aa, Homo sapiens [sequence omitted]

SEQ ID NO: 679 - DNA, 1785 bp, Homo sapiens
ggcacgaggcgccggccgccatgtggagctgcagctggttcaacggcacagggctggtggaggagctgcctgcctgccaggacctgcagctggggctgtcactgttgtcgctgctgggcctggtggtgggcgtgccagtgggcctgtgctacaacgccctgctggtgctggccaacctacacagcaaggccagcatgaccatgccggacgtgtactttgtcaacatggcagtggcaggcctggtgctcagcgccctggcccctgtgcacctgctcggccccccgagctcccggtgggcgctgtggagtgtgggcggcgaagtccacgtggcactgcagatccccttcaatgtgtcctcactggtggccatgtactccaccgccctgctgagcctcgaccactacatcgagcgtgcactgccgcggacctacatggccagcgtgtacaacacgcggcacgtgtgcggcttcgtgtggggtggcgcgctgctgaccagcttctcctcgctgctcttctacatctgcagccatgtgtccacccgcgcgctagagtgcgccaagatgcagaacgcagaagctgccgacgccacgctggtgttcatcggctacgtggtgccagcactggccaccctctacgcgctggtgctactctcccgcgtccgcagggaggacacgcccctggaccgggacacgggccggctggagccctcggcacacaggctgctggtggccaccgtgtgcacgcagtttgggctctggacgccacactatctgatcctgctggggcacacggtcatcatctcgcgagggaagcccgtggacgcacactacctggggctactgcactttgtgaaggatttctccaaactcctggccttctccagcagctttgtgacaccacttctctaccgctacatgaaccagagcttccccagcaagctccaacggctgatgaaaaagctgccctgcggggaccggcactgctccccggaccacatgggggtgcagcaggtgctggcgtaggcggcccagccctcctggggagacgtgactctggtggacgcagagcacttagttaccctggacgctccccacatccttccagaaggagacgagctgctggaagagaagcaggaggggtgtttttcttgaagtttcctttttcccacaaatgccactcttgggccaaggctgtggtccccgtggctggcatctggcttgagtctccccgaggcctgtgcgtctcccaaacacgcagctcaaggtccacatctgcaaaagcctcctcgccttcagcctcctcagcattcagtttgtcaatgaagtgatgaaagcttagagccagtatttatactttgtggttaaaatacttgattcccccttgtttgttttacaaaaacagatgtttcctagaaaaatgacaaatagtaaaatgaacaaaaccctacgaaagaatggcaacagccagggtggccgggccctgccagtgggcggcgtgtgctagcaaggcctgccgggtgtgccgcagtcaccacagggttctgagaacatttcacagaagtgcctgagacgcggagacatggctggtgttaaatggagctattcaatagcagtgacgcgctctcctcagccaccaaatgtccctgacaccctccccagcccccacagataacatcagctgaggtttttttcagtatgaacctgtcctaaatcaattcctcaaagtgtgcacaaaactaaagaatataaataaacaaaagaaaggtgaaaaaaaaaaaaaaaaaaa

SEQ ID NO: 680 - protein, 333 aa, Homo sapiens
  MISC_FEATURE (11)..(11): Unknown Amino Acid
  MISC_FEATURE (17)..(17): Unknown Amino Acid
MWSCSWFNGTXLVEELXACQDLQLGLSLLSLLGLVVGVPVGLCYNALLVLANLHSKASMTMPDVYFVNMAVAGLVLSALAPVHLLGPPSSRWALWSVGGEVHVALQIPFNVSSLVAMYSTALLSLDHYIERALPRTYMASVYNTRHVCGFVWGGALLTSFSSLLFYICSHVSTRALECAKMQNAEAADATLVFIGYVVPALATLYALVLLSRVRREDTPLDRDTGRLEPSAHRLLVATVCTQFGLWTPHYLILLGHTVIISRGKPVDAHYLGLLHFVKDFSKLLAFSSSFVTPLLYRYMNQSFPSKLQRLMKKLPCGDRHCSPDHMGVQQVLA

SEQ ID NO: 681 - DNA, 1737 bp, Homo sapiens
tccggactagttctagaccgctgcgggccgccaggcgccgggaatgtcccctgaatgcgcgcgggcagcgggcgacgcgcccttgcgcagcctggagcaagccaaccgcacccgctttcccttcttctccgacgtcaagggcgaccaccggctggtgctggccgcggtggagacaaccgtgctggtgctcatctttgcagtgtcgctgctgggcaacgtgtgcgccctggtgctggtggcgcgccgacgacgccgcggcgcgactgcctgcctggtactcaacctcttctgcgcggacctgctcttcatcagcgctatccctctggtgctggccgtgcgctggactgaggcctccctgctgggccccgttgcctgccacctgctcttctacgtgatgaccctgagcggcagcgtcaccatcctcacgctggccgcggtcagcctggagggcatggtgrgcatcgrgcacctggagcgcggcgtgcggggtcctccgcggcgggcgcgggcagtgctgctggcsctcatctgggcctattcggcggtcgccgctctgcctctgtgcgtcttctttcgagtcgtcccgcaacggctccccggcgccgaccaggaaatttcgatttgcacactgatttggcccagcattcctcgagagatctcgtgggatgtctcttttgttactttgaacttcttggtgccaggactggtcattgtgatcagttactccaaaattttacagatcacaaaggcatcaaggaagaggctcaccgtaagcctggcctactcggagacccaccagatccgcgtgtcccagcaggacttccggctcttccgcaccctcttcctcctcatggtctccttcttcatcatgtggagccccatcatcatcaccatcctcctcatcctgatccagaacttcaagcaagacctggtcatctggccgtccctcttcttctgggtggtccccttcacatttgctaattcagccctaaaccccatcctctacaacatgacactgtgcaggaatgagtggaagaaaattttttgctgcttctggttcccagaaaagggagccattttaacagacacatctgtcaaaagaaatgacttgtcgattatttctggctaattttctttatagccgagtttctcacacctggcgagctgtggcatgcttttaaacagagttcatttccagtaccctccatcagtgcaccctgctttaagaaaatgaacctatgcaaatagacatccacagcgtcggtaaattaaggggtgatcaccaagtttcataatattttccctttataaaaggatttgttggccaggtgcagtggttcatgcctgtaatcccagcagtttgggctgaggtgggtggatcacctgaggtcaggagttcgagaccaacctgaccaacatggtgagacccccgtctctactaaaaataaaaaaaaaaattagctgggagtggtggtgggcacctgtaatcctagctacttgggaggctcaaccacgagaatctcttgaacctgggaggcagaggttgcagtgagccgagatcgtgccattgcactccaaccagggcaacaagagtgaaactccatcttaaaaaaaaaaaaaaaagatttgttatgggttccttttaaatgtgaacttttttagtgtgtttgtatatgatcaaatttaataaatatttatttatgactgttcagcaaaaaaaaaaaaaaaaaagggcgg

SEQ ID NO: 682 - protein, 361 aa, Homo sapiens
MSPECARAAGDAPLRSLEQANRTRFPFFSDVKGDHRLVLAAVETTVLVLIFAVSLLGNVCALVLVARRRRRGATACLVLNLFCADLLFISAIPLVLAVRWTEAWLLGPVACHLLFYVMTLSGSVTILTLAAVSLDRMVCIVMLQRGVRCPGRRARAVLLALIWGYSAVAALPLCVFFRVVPQRLPGADQEISICTLIWPTIPGEISWDVSFVTLNFLVPGLVIVISYSKILQTTKASRKRLTVSLAYSRSHQIRVSQQDFRLFRTLFLLMVSFFIMWSPIIDTILLILIQNFKQDLVIWPSLPPWVVAPTFANSALNPILYNMTLCRNEWKKIFCCTWFPEKGAILTDTSVKRNDLSIISG

SEQ ID NO: 683 - protein, 669 aa, Homo sapiens
ITYSAISDELRDKVRFPALLRTTPSADHHVEAMVQLMLHFRWNWIIVLVSSDTYGRDNGQLLGERVARRDICIAFQETLPTLQPNQNMTSEERQRLVTIVDKLQQSTARVVVVFSPDLTLYHFFNEVLRQNFTGAVWIASESWAIDPVLHNLTELGHLGTFLGITIQSVPIPGFSEFREWGPQAGPPPLSRTSQSYTCNQECDNCLNATLSFNTILRLSGERVVYSVYSAVYAVAHALHSLLGCDKSTCTKRVVYPWQLLEEIWKVNFTLLDHQIFFDPQGDVALHLEIVQWQWDRSQNPFQSVASYYPLQRQLKNIKTSLHTVNNTIPMSMCSKRCQSGQKKKPVGIHVCCFECIDCLPGTFLNHTECPNNEWSYQSETSCFKRQLVFLEWHEAPTIAVALLAALGFLSTLAILVIFWRHFQTPIVRSAGGPMCFLMLTLLLVAYMVVPVYVGPPKVSTCLCRQALFPLCFTICISCIAVRSFQIVCAFKMASRFPRAYSYWVRYQGPYVSMAFITVLKMVIVVIGMLARPQSHPRTDPDDPKITIVSCNPNYRNSLLFNTSLDLLLSVVGFSFAYMGKELPTNYNEAKFITLSMTFYFTSSVSLCTFMSAYSGVLVTIVDLLVTVLNLLAISLGYFGPKCYMILFYPERNTPAYFNSMIQGYTMRRD

SEQ ID NO: 684 - DNA, 1038 bp, Homo sapiens
atgagcagcaattcatccctgctggtggctgtgcagctgtgctacgcgaacgtgaatgggtcctgtgtgaaaatccccttctcgccgggatcccgggtgattctgtacatagtgtttggctttggggctgtgctggctgtgtttggaaacctcctggtgatgatttcaatcctccatttcaagcagctgcactctccgaccaattttctcgttgcctctctggcctgcgctgatttcttggtgggtgtgactgtgatgcccttcagcatggtcaggacggtggagagctgctggtattttgggaggagtttttgtactttccacacctgctgtgatgtggcattttgttactcttctctctttcacttgtgcttcatctccatcgacaggtacattgcggttactgaccccctggtctatcctaccaagttcaccgtatctgtgtcaggaatttgcatcagcgtgtcctggatcctgcccctcatgtacagcggtgctgtgttctacacaggtgtctatgacgatgggctggaggaattatctgatgccctaaactgtataggaggttgtcagaccgttgtaaatcaaaactgggtgttgacagattttctatccttctttatacctacctttattatgataattctgtatggtaacatatttcttgtggctagacgacaggcgaaaaagatagaaaatactggtagcaagacagaatcatcctcagagagttacaaagccagagtggccaggagagagagaaaagcagctaaaaccctgggggtcacagtggtagcatttatgatttcatggttaccatatagcattgattcattaattgatgcctttatgggctttataacccctgcctgtatttatgagatttgctgttggtgtgcttattataactcagccatgaatcctttgatttatgctttattttacccatggtttaggaaagcaataaaagttattgtaactggtcaggttttaaagaacagttcagcaaccatgaatttgttttctgaacatatataa

SEQ ID NO: 685 - protein, 345 aa, Homo sapiens
MSSNSSLLVAVQLCYANVNGSCVKIPFSPGSRVILYIVFGFGAVLAVFGNLLVMISILHFKQLHSPTNFLVASLACADFLVGVTVMPFSMVRTVESCWYFGRSFCTFHTCCDVAFCYSSLFHLCFISIDRYIAVTDPLVYPTKFTVSVSGICISVSWILPLMYSGAVFYTGVYDDGLEELSDALNCIGGCQTVVNQNWVLTDFLSFFIPTFIMIILYGNIFLVARRQAKKIENTGSKTESSSESYKARVARRERKAAKTLGVTVVAFMISWLPYSIDSLIDAFMGFITPACIYEICCWCAYYNSAMNPLIYALFYPWFRKAIKVIVTGQVLKNSSATMNLFSEHI

SEQ ID NO: 686 - DNA, 1029 bp, Homo sapiens
atgaccagcaatttttcccaacctgttgtgcagctttgctatgaggatgtgaatggatcttgtattgaaactccctattctcctgggtcccgggtaattctgtacacggcgtttagctttgggtctttgctggctgtatttggaaatctcttagtaatgacttctgttcttcattttaagcagctgcactctccaaccaattttctcattgcctctctggcctgtgctgacttcttggtaggtgtgactgtgatgcttttcagcatggtcaggacggtggagagctgctggtattttggagccaaattttgtactcttcacagttgctgtgatgtggcattttgttactcttctgtcctccacttgtgcttcatctgcatcgacaggtacattgtggttactgatcccctggtctatgctaccaagttcaccgtgtctgtgtcgggaatttgcatcagcgtgtcctggattctgcctctcacgtacagcggtgctgtgttctacacaggtgtcaatgatgatgggctggaggaattagtaagtgctctcaactgcgtaggtggctgtcaaattattgtaagtcaaggctgggtgttgatagattttctgttattcttcatacctacccttgttatgataattctttacagtaagatttttcttatagctaaacaacaagctataaaaattgaaactactagtagcaaagtagaatcatcctcagagagttataaaatcagagtggccaagagagagaggaaagcagctaaaaccctgggggtcacggtactagcatttgttatttcatggttaccgtatacagttgatatattaattgatgcctttatgggcttcctgacccctgcctatatctatgaaatttgctgttggagtgcttattataactcagccatgaatcctttgatttatgctctattttatccttggtttaggaaagccataaaacttattttaagtggagatgttttaaaggctagttcatcaaccattagtttatttttagaataa

SEQ ID NO: 687 - protein, 342 aa, Homo sapiens
MTSNFSQPVVQLCYEDVNGSCIETPYSPGSRVILYTAFSFGSLLAVFGNLLVMTSVLHFKQLHSPTNFLIASLACADFLVGVTVMLFSMVRTVESCWYFGAKFCTLHSCCDVAFCYSSVLHLCFICIDRYIVVTDPLVYATKFTVSVSGICISVSWILPLTYSGAVFYTGVNDDGLEELVSALNCVGGCQIIVSQGWVLIDFLLFFIPTLVMIILYSKIFLIAKQQAIKIETTSSKVESSSESYKIRVAKRERKAAKTLGVTVLAFVISWLPYTVDILIDAFMGFLTPAYIYEICCWSAYYNSAMNPLIYALFYPWFRKAIKLILSGDVLKASSSTISLFLE

SEQ ID NO: 688 - DNA, 1604 bp, Homo sapiens
tgcatggtcttccttcctgtccatggatgaccagtcctagtcacgagtgtgtcacaaccacctctttgtgtatctgaattcctccacctgaaagaaaatttcagacccaggatagattaatcatcgggtccaaagccctggccggatgagtgggggtgttttgatcctaatgttattcccatgtcagcacagaacttgtgtggcagtagagagatgtcaggcttcagagtcaacaagaactggatttcaaactggatttgaggacccccacctttggtaagtgacttattatctgcgagcctctgtttctctcttctttaaatgaggacagtaaatcccatacggcagggtggtggggagaatcagagatgatacagctggtgatcacatctggtttgtgttcccaggggcaccagactagagtttctgagcatggatccaaccgtcccagtcttcggtacaaaactgacaccaatcaacggacgtgaggagactccttgctacaatcagaccctgagcttcacggtgctgacgtgcatcatttcccttgtcggactgacaggaaacgcggtagtgctctggctcctgggctaccgcatgcgcaggaacgctgtctccatctacatcctcaacctggccgcagcagacttcctcttcctcagcttccagattatacgttcgccattacgcctcatcaatatcagccatctcatccgcaaaatcctcgtttctgtgatgacctttccctactttacaggcctgagtatgctgagcgccatcagcaccgagcgctgcctgtctgttctgtggcccatctggtaccgctgccgccgccccacacacctgtcagcggtcgtgtgtgtcctgctctggggcctgtccctgctgtttagtatgctggagtggaggttctgtgacttcctgtttagtggtgctgattctagttggtgtgaaacgtcagatttcatcccagtcgcgtggctgatttttttatgtgtggttctctgtgtttccagcctggtcctgctggtcaggatcctctgtggatcccggaagatgccgctgaccaggctgtacgtgaccatcctgctcacagtgctggtcttcctcctctgcggcctgcccttcggcattctgggggccctaatttacaggatgcacctgaatttggaagtcttatattgtcatgtttatctggtttgcatgtccctgtcctctctaaacagtagtgccaaccccatcatttacttcttcgtgggctcctttaggcagcgtcaaaataggcagaacctgaagctggttctccagagggctctgcaggacaagcctgaggtggataaaggtgaagggcagcttcctgaggaaagcctggagctgtcgggaagcagattggggccatgagggagagcctctgccctgtcagtcagacgggactttgagagcaacactgtcctgccacccttgacaattacatgcgtttttcttagcgtttcgcctcagaaatgtctcagtggtaactcaaggtcttcaaataaatgtttatctaacctgacagttgcagttttcacccatggaaagcattagtctgacagtacaatgtttgg

SEQ ID NO: 689 - protein, 322 aa, Homo sapiens
MDPTVPVFGTKLTPINGREETPCYNQTLSFTVLTCIISLVGLTGNAVVLWLLGYRMRRNAVSIYILNLAAADFLFLSFQIIRSPLRLINISHLIRKILVSVMTFPYFTGLSMLSAISTERCLSVLWPIWYRCRRPTHLSAVVCVLLWGLSLLFSMLEWRFCDFLFSGADSSWCETSDFIPVAWLIFLCVVLCVSSLVLLVRILCGSRKMPLTRLYVTILLTVLVFLLCGLPFGILGALIYRMHLNLEVLYCHVYLVCMSLSSLNSSANPIIYFFVGSFRQRQNRQNLKLVLQRALQDKPEVDKGEGQLPEESLELSGSRLGP

SEQ ID NO: 690 - DNA, 1011 bp, Homo sapiens
atgaacaacaatacaacatgtattcaaccatctatgatctcttccatggctttaccaatcatttacatcctcctttgtattgttggtgtttttggaaacactctctctcaatggatatttttaacaaaaataggtaaaaaaacatcaacgcacatctacctgtcacaccttgtgactgcaaacttacttgtgtgcagtgccatgcctttcatgagtatctatttcctgaaaggtttccaatgggaatatcaatctgctcaatgcagagtggtcaattttctgggaactctatccatgcatgcaagtatgtttgtcagtctcttaattttaagttggattgccataagccgctatgctaccttaatgcaaaaggattcctcgcaagagactacttcatgctatgagaaaatattttatggccatttactgaaaaaatttcgccagcccaactttgctagaaaactatgcatttacatatggggagttgtactgggcataatcattccagttaccgtatactactcagtcatagaggctacagaaggagaagagagcctatgctacaatcggcagatggaactaggagccatgatctctcagattgcaggtctcattggaaccacatttattggattttcctttttagtagtactaacatcatactactcttttgtaagccatctgagaaaaataagaacctgtacgtccattatggagaaagatttgacttacagttctgtgaaaagacatcttttggtcatccagattctactaatagtttgcttccttccttatagtatttttaaacccattttttatgttctacaccaaagagataactgtcagcaattgaattatttaatagaaacaaaaaacattctcacctgtcttgcttcggccagaagtagcacagaccccattatatttcttttattagacaaaacattcaagaagacactatataatctctttacaaagtctaattcagcacatatgcaatcatatggttga

SEQ ID NO: 691 - protein, 336 aa, Homo sapiens
MNNNTTCIQPSMISSMALPIIYILLCIVGVFGNTLSQWIFLTKIGKKTSTHIYLSHLVTANLLVCSAMPFMSIYFLKGFQWEYQSAQCRVVNFLGTLSMHASMFVSLLILSWIAISRYATLMQKDSSQETTSCYEKIFYGHLLKKFRQPNFARKLCIYIWGVVLGIIIPVTVYYSVIEATEGEESLCYNRQMELGAMISQIAGLIGTTFIGFSFLVVLTSYYSFVSHLRKIRTCTSIMEKDLTYSSVKRHLLVIQILLIVCFLPYSIFKPIFYVLHQRDNCQQLNYLIETKNILTCLASARSSTDPIIFLLLDKTFKKTLYNLFTKSNSAHMQSYG

SEQ ID NO: 692 - protein, 20 aa, Homo sapiens
CAPASFERKNERNAEAKRKM

SEQ ID NO: 693 - protein, 19 aa, Homo sapiens
GRIFRAARFRIRKTVKKVE

SEQ ID NO: 694 - protein, 16 aa, Homo sapiens
RTPEDRSDPDACTISK

SEQ ID NO: 695 - protein, 17 aa, Homo sapiens
RHGASPAPQPKKSVNGE

SEQ ID NO: 696 - protein, 19 aa, Homo sapiens
KQTPNRTGKRLTRAQLITD

SEQ ID NO: 697 - protein, 17 aa, Homo sapiens
SPGSTSSVTSINSRVPD

SEQ ID NO: 698 - protein, 16 aa, Homo sapiens
KVRVSDALLEKKKLMA

SEQ ID NO: 699 - protein, 15 aa, Homo sapiens
ANLSSAPSQNCSAKD

SEQ ID NO: 700 - protein, 16 aa, Homo sapiens
IKLADSALERKRISAA

SEQ ID NO: 701 - protein, 16 aa, Homo sapiens
QEASNRSLNATETSEA

SEQ ID NO: 702 - protein, 16 aa, Homo sapiens
RIYRAARNRILNPPSL

SEQ ID NO: 703 - protein, 17 aa, Homo sapiens
KAQEEMSDCLVNTSQIS

SEQ ID NO: 704 - protein, 17 aa, Homo sapiens
RHLSNRSTDSQNSFASC

SEQ ID NO: 705 - protein, 18 aa, Homo sapiens
CTTEASMAIRPKTITEKM

SEQ ID NO: 706 - protein, 16 aa, Homo sapiens
DNDLDHPGERQQISST

SEQ ID NO: 707 - protein, 16 aa, Homo sapiens
CVSDFSTSDPTTEFEK

SEQ ID NO: 708 - protein, 17 aa, Homo sapiens
RIYHAAKSLYQKRGSSR

SEQ ID NO: 709 - protein, 16 aa, Homo sapiens
ESGEKSTKSVSTSYVL

SEQ ID NO: 710 - protein, 17 aa, Homo sapiens
DKCKISEEMSNFLAWLG

SEQ ID NO: 711 - protein, 16 aa, Homo sapiens
IAKEEVNGQVLLESGE

SEQ ID NO: 712 - protein, 17 aa, Homo sapiens
STVRSLRSEFKHEKSWR

SEQ ID NO: 713 - protein, 17 aa, Homo sapiens
DAFNWTVDSENRTNLSC

SEQ ID NO: 714 - protein, 15 aa, Homo sapiens
FGLQDDSKVFKEGSC

SEQ ID NO: 715 - protein, 20 aa, Homo sapiens
PGSYTGRRTMQSISNEQKAC

SEQ ID NO: 716 - protein, 20 aa, Homo sapiens
CSMVALGKQHSEEASKDNSD

SEQ ID NO: 717 - protein, 17 aa, Homo sapiens
NTIPALAYKSSQLQMGQ

SEQ ID NO: 718 - protein, 15 aa, Homo sapiens
KGIETDVDNPNNITC

SEQ ID NO: 719 - protein, 18 aa, Homo sapiens
CSSPEKVAMLDGSRKDKA

SEQ ID NO: 720 - protein, 17 aa, Homo sapiens
RRTSTIGKKSVQTISNE

SEQ ID NO: 721 - protein, 18 aa, Homo sapiens
CNYRATKSVKTLRKRSSK

SEQ ID NO: 722 - protein, 20 aa, Homo sapiens
SGLQTESIPEEMKQIVEEQG

SEQ ID NO: 723 - protein, 20 aa, Homo sapiens
CKRNTAEEENSANPNQDQNA

SEQ ID NO: 724 - protein, 16 aa, Homo sapiens
GHTEEPPGLSLDFLKC

SEQ ID NO: 725 - protein, 17 aa, Homo sapiens
CNYKVEKKPPVRQIPRV

SEQ ID NO: 726 - protein, 16 aa, Homo sapiens
IGLRDEEKVFVNNTTC

SEQ ID NO: 727 - protein, 16 aa, Homo sapiens
RHTNEPVIEKASDNEP

SEQ ID NO: 728 - protein, 20 aa, Homo sapiens
RNAVHSFLVHLIGLLVWQCD

SEQ ID NO: 729 - protein, 20 aa, Homo sapiens
CDISVSPVAAIVTDIFNTSD

SEQ ID NO: 730 - protein, 18 aa, Homo sapiens
DGGRFKFPDGVQNWPALS

SEQ ID NO: 731 - protein, 16 aa, Homo sapiens
NNIGIIDLIEKRKFNQ

SEQ ID NO: 732 - protein, 16 aa, Homo sapiens
ESRPQSADQHSTHRMR

SEQ ID NO: 733 - protein, 17 aa, Homo sapiens
CDDERYRRPSILGQTVP

SEQ ID NO: 734 - protein, 20 aa, Homo sapiens
RDAVECGGQWESQCHPPATS

SEQ ID NO: 735 - protein, 24 aa, Homo sapiens
VTAKEHAHQIQMLQRAGASSESRP

SEQ ID NO: 736 - protein, 16 aa, Homo sapiens
KSFRRAFLIILCCDDE

SEQ ID NO: 737 - protein, 18 aa, Homo sapiens
VTAKEHAHQIQMLQRAGA

SEQ ID NO: 738 - protein, 15 aa, Homo sapiens
KEHAHQIQMLQRAGA

SEQ ID NO: 739 - protein, 15 aa, Homo sapiens
VTAKEHAHQIQMLQR

SEQ ID NO: 740 - protein, 18 aa, Homo sapiens
RTPRPGVESADSRRLATK

SEQ ID NO: 741 - protein, 17 aa, Homo sapiens
CPRERQASLASPSLRTS

SEQ ID NO: 742 - protein, 17 aa, Homo sapiens
PLFMRDFKRALGRFLPC

SEQ ID NO: 743 - protein, 17 aa, Homo sapiens
RAAAAVNFFNIDPAEPE

SEQ ID NO: 744 - protein, 20 aa, Homo sapiens
EVTASPAPTWDAPPDNASGC

SEQ ID NO: 745 - protein, 19 aa, Homo sapiens
KAARKSAAKHKFPGFPRVE

SEQ ID NO: 746 - protein, 20 aa, Homo sapiens
CANLSRLLKHERKNISIFKR

SEQ ID NO: 747 - protein, 16 aa, Homo sapiens
KLAERPERPEFVLRAC

SEQ ID NO: 748 - protein, 15 aa, Homo sapiens
CHKPSILTYIAIFLT

SEQ ID NO: 749 - protein, 20 aa, Homo sapiens
NGSMGEPVIKCEFEKVISME

SEQ ID NO: 750 - protein, 20 aa, Homo sapiens
NKKVSASSGDPQKYYGKELK

SEQ ID NO: 751 - protein, 20 aa, Homo sapiens
NDHFRCQPAPPIDEDLPEER

SEQ ID NO: 752 - protein, 18 aa, Rattus norvegicus
CQPKPPIDEDLPEEKAED

SEQ ID NO: 753 - protein, 17 aa, Rattus norvegicus
QPKPPIDEDLPEEKAED

SEQ ID NO: 754 - protein, 19 aa, Homo sapiens
MPPSISAFQAAYIGIEVLI

SEQ ID NO: 755 - protein, 20 aa, Homo sapiens
QGNTGLPDVELLSHELKGVC

SEQ ID NO: 756 - protein, 17 aa, Homo sapiens
MPIMGSSVYITVELAIA

SEQ ID NO: 757 - protein, 16 aa, Homo sapiens
RSHVLRQQEPFKAAGT

SEQ ID NO: 758 - protein, 16 aa, Canis familiaris
RIREFRQTFRKIIRSH

SEQ ID NO: 759 - protein, 19 aa, Homo sapiens
KDSATNNCTEPWDGTTNES

SEQ ID NO: 760 - protein, 20 aa, Homo sapiens
CRQLQRTELMDHSRTTLQRE

SEQ ID NO: 761 - protein, 19 aa, Homo sapiens
RNRDFRYTFHKIISRYLLC

SEQ ID NO: 762 - protein, 16 aa, Homo sapiens
CQADVKSGNGQAGVQP

SEQ ID NO: 763 - protein, 16 aa, Homo sapiens
CVTLFQPAQGKNKPKW

SEQ ID NO: 764 - protein, 20 aa, Homo sapiens
MLLETQDALYVALELVIAAL

SEQ ID NO: 765 - protein, 18 aa, Homo sapiens
IFYIIRNKLSLNLSNSKE

SEQ ID NO: 766 - protein, 17 aa, Homo sapiens
NMKLTSEYHRNVTFLSC

SEQ ID NO: 767 - protein, 18 aa, Homo sapiens
AYKIKKFKETYLLILKAC

SEQ ID NO: 768 - protein, 16 aa, Homo sapiens
TGAFYGREFKTAKSLF

SEQ ID NO: 769 - protein, 16 aa, Homo sapiens
KRVTTHRRIWLALGLC

SEQ ID NO: 770 - protein, 15 aa, Homo sapiens
CPRVVLPEEIFFTIS

SEQ ID NO: 771 - protein, 20 aa, Homo sapiens
MGYLKPRGSFETTADDIIDS

SEQ ID NO: 772 - protein, 16 aa, Homo sapiens
RYHSIVTMRRTVVVLT

SEQ ID NO: 773 - protein, 17 aa, Homo sapiens
AFRSPELRDAFKKMIFC

SEQ ID NO: 774 - protein, 20 aa, Homo sapiens
RSTTRSLEAGVKRERGKASE

SEQ ID NO: 775 - protein, 18 aa, Homo sapiens
KEPVPPDERFCGITEEAG

SEQ ID NO: 776 - protein, 15 aa, Homo sapiens
RSTEMVQRLRMEAVQ

SEQ ID NO: 777 - protein, 17 aa, Homo sapiens
PRPSCAPKSPACRTRSP

SEQ ID NO: 778 - protein, 16 aa, Homo sapiens
KEMSNSKELTLRIHSK

SEQ ID NO: 779 - protein, 20 aa, Homo sapiens
GGSLERSQSRKDSLDDSGSC

SEQ ID NO: 780 - protein, 16 aa, Homo sapiens
APEPPGRRGRHDSGPL

SEQ ID NO: 781 - protein, 20 aa, Homo sapiens
KLLTEPESPGTDGGASNGGC

SEQ ID NO: 782 - protein, 16 aa, Homo sapiens
GSGMASAKTKTHFSVR

SEQ ID NO: 783 - protein, 20 aa, Homo sapiens
RIPVGSRETFYRISKTDGVC

SEQ ID NO: 784 - protein, 19 aa, Homo sapiens
SSMPRGSARITVSKDQSSC

SEQ ID NO: 785 - protein, 16 aa, Homo sapiens
ESRGLKSGLKTDKSDS

SEQ ID NO: 786 - protein, 16 aa, Homo sapiens
ERRPNGLGPERSAGPG

SEQ ID NO: 787 - protein, 16 aa, Homo sapiens
PGEPAPAGPRDTDALD

SEQ ID NO: 788 - protein, 18 aa, Homo sapiens
RGPRGKGKARASQVKPGD

SEQ ID NO: 789 - protein, 18 aa, Homo sapiens
RGPGATGIGTPAAGPGEE

SEQ ID NO: 790 - protein, 17 aa, Homo sapiens
RVGAAKASRWRGRQNRE

SEQ ID NO: 791 - protein, 16 aa, Homo sapiens
IYKGDQGPQPRGRPQC

SEQ ID NO: 792 - protein, 17 aa, Homo sapiens
RSNRRGPRAKGGPGQGE

SEQ ID NO: 793 - protein, 16 aa, Homo sapiens
ASAREVNGHSKSTGEK

SEQ ID NO: 794 - protein, 16 aa, Homo sapiens
RGVGAIGGQWWRRRAH

SEQ ID NO: 795 - protein, 16 aa, Homo sapiens
RAPVGPDGASPTTENG

SEQ ID NO: 796 - protein, 16 aa, Homo sapiens
RTGTARPRPPTWSRTR

SEQ ID NO: 797 - protein, 16 aa, Homo sapiens
ASRSPGPGGRLSRASS

SEQ ID NO: 798 - protein, 18 aa, Homo sapiens
RSVEFFLSRRRRARSSVC

SEQ ID NO: 799 - protein, 17 aa, Homo sapiens
PMASGRQQRRRQARVTC

SEQ ID NO: 800 - protein, 16 aa, Homo sapiens
NYHILASLRTREEVSR

SEQ ID NO: 801 - protein, 16 aa, Homo sapiens
RVRGPKDSKTTALILT

SEQ ID NO: 802 - protein, 16 aa, Homo sapiens
VGRLFRTKVWELYKQC

SEQ ID NO: 803 - protein, 17 aa, Homo sapiens
FRTMKEYSDEGHNVTAC

SEQ ID NO: 804 - protein, 19 aa, Homo sapiens
CTMQIMQVLRNNEMQKFKE

SEQ ID NO: 805 - protein, 17 aa, Homo sapiens
CQDERIIDVITQIASFM

SEQ ID NO: 806 - protein, 18 aa, Homo sapiens
CRSEPIQMENSMGTLRTS

SEQ ID NO: 807 - protein, 16 aa, Homo sapiens
RVFREAQKQVKKIDSC

SEQ ID NO: 808 - protein, 16 aa, Homo sapiens
CERRFLGGPARPPSPS

SEQ ID NO: 809 - protein, 18 aa, Homo sapiens
ANGRAGKRRPSRLVALRE

SEQ ID NO: 810 - protein, 20 aa, Homo sapiens
CARRAARRRHATHGDRPRAS

SEQ ID NO: 811 - protein, 16 aa, Homo sapiens
CLARPGPPPSPGAASD

SEQ ID NO: 812 - protein, 16 aa, Homo sapiens
CNGGAAADSDSSLDEP

SEQ ID NO: 813 - protein, 16 aa, Homo sapiens
KRQLQKIDKSEGRFHV

SEQ ID NO: 814 - protein, 18 aa, Homo sapiens
GEQSGYHVEQEKENKLLC

SEQ ID NO: 815 - protein, 16 aa, Homo sapiens
APNRSHAPDHDVTQQR

SEQ ID NO: 816 - protein, 16 aa, Homo sapiens
VPLVIMVFVYSRVFQE

SEQ ID NO: 817 - protein, 16 aa, Homo sapiens
RGELGRFPPEESPPAP

SEQ ID NO: 818 - protein, 16 aa, Homo sapiens
SRSLAPAPVGTCAPPE

SEQ ID NO: 819 - protein, 17 aa, Homo sapiens
GVPACGRRPARLLPLRE

SEQ ID NO: 820 - protein, 17 aa, Homo sapiens
PSGVPAARSSPAQPRLC

SEQ ID NO: 821 - protein, 20 aa, Homo sapiens
EEEFYLFKNISSVGPWDGPQ

SEQ ID NO: 822 - protein, 18 aa, Homo sapiens
CGPDWYTVGTKYRSESYT

SEQ ID NO: 823 - protein, 16 aa, Homo sapiens
NNRNHGLDLRLVTIPS

SEQ ID NO: 824 - protein, 16 aa, Homo sapiens
IMKMVCGKAMTDESDT

SEQ ID NO: 825 - protein, 20 aa, Homo sapiens
SITNDTESSSSVVSNDNTNK

SEQ ID NO: 826 - protein, 19 aa, Homo sapiens
KAVVKPLERQPSNAILKTC

SEQ ID NO: 827 - protein, 20 aa, Homo sapiens
RDPNKNMTFESCTSYPVSKK

SEQ ID NO: 828 - protein, 20 aa, Homo sapiens
RTLYKSTLNIPTEEQSHARK

SEQ ID NO: 829 - protein, 20 aa, Homo sapiens
KSFQKHFKAQLFCCKAERPE

SEQ ID NO: 830 - protein, 16 aa, Homo sapiens
NKGWSGDNSPGIEALC

SEQ ID NO: 831 - protein, 19 aa, Homo sapiens
QRQPHSPNQTLISITNDTE

SEQ ID NO: 832 - protein, 16 aa, Homo sapiens
RPEPPVADTSLTTLAV

SEQ ID NO: 833 - protein, 19 aa, Homo sapiens
SEISVTSFTGCSVKQAEDR

SEQ ID NO: 834 - protein, 19 aa, Homo sapiens
ELDRLDNYNDTSLVENHLC

SEQ ID NO: 835 - protein, 17 aa, Homo sapiens
SQGHHNNSLPRCTFSQE

SEQ ID NO: 836 - protein, 16 aa, Homo sapiens
CYVGVVHRLRQAQRRP

SEQ ID NO: 837 - protein, 18 aa, Homo sapiens
CQLFPSWRRSSLSESENA

SEQ ID NO: 838 - protein, 18 aa, Homo sapiens
TEDYDTTTEFDYGDATPC

SEQ ID NO: 839 - protein, 20 aa, Homo sapiens
ASMPGLYFSKTQWEFTHHTC

SEQ ID NO: 840 - protein, 18 aa, Homo sapiens
CSLHFPHESLREWKLFQA

SEQ ID NO: 841 - protein, 16 aa, Homo sapiens
TILISVFQDFLFTHEC

SEQ ID NO: 842 - protein, 16 aa, Homo sapiens
CSALYPEDTVYSWRHF

SEQ ID NO: 843 - protein, 17 aa, Homo sapiens
PEFIFYETEELFEETLC

SEQ ID NO: 844 - protein, 16 aa, Homo sapiens
SSYQSILFGNDCERSK

SEQ ID NO: 845 - protein, 16 aa, Homo sapiens
GRYIPFLPSEKLERTS

SEQ ID NO: 846 - protein, 20 aa, Homo sapiens
DDVGLLCEKADTRALMAQFV

SEQ ID NO: 847 - protein, 20 aa, Mus musculus
MNATEVTDTTQDETVYNSYY

SEQ ID NO: 848 - protein, 18 aa, Homo sapiens
DESIYSNYYLYESIPKPC

SEQ ID NO: 849 - protein, 18 aa, Homo sapiens
DTPSSSYTQSTMDHDLHD

SEQ ID NO: 850 - protein, 16 aa, Homo sapiens
LETLVELEVLQDCTFE

SEQ ID NO: 851 - protein, 18 aa, Homo sapiens
RNHTYCKTKYSLNSTTWK

SEQ ID NO: 852 - protein, 17 aa, Homo sapiens
CQDEVTDDYIGDNTTVD

SEQ ID NO: 853 - protein, 19 aa, Homo sapiens
PELLYSDLQRSSSEQAMRC

SEQ ID NO: 854 - protein, 19 aa, Homo sapiens
QLRQWSSCRHIRRSSMSVE

SEQ ID NO: 855 - protein, 17 aa, Homo sapiens
GVKFRNDLFKLFKDLGC

SEQ ID NO: 856 - protein, 17 aa, Homo sapiens
PDIFSSPCDAELIQTNG

SEQ ID NO: 857 - protein, 19 aa, Homo sapiens
KILHQLKRCQNHNKTKAIR

SEQ ID NO: 858 - protein, 16 aa, Homo sapiens
SQIFNYLGRQMPRESC

SEQ ID NO: 859 - protein, 18 aa, Homo sapiens
FVGEKFKKHLSEIFQKSC

SEQ ID NO: 860 - protein, 17 aa, Homo sapiens
ENFSSSYDYGENESDSC

SEQ ID NO: 861 - protein, 20 aa, Homo sapiens
CYAHILAVLLVSRGQRRLRA

SEQ ID NO: 862 - protein, 20 aa, Homo sapiens
MVLEVSDHQVLNDAEVAALL

SEQ ID NO: 863 - protein, 17 aa, Homo sapiens
CPNQRGLQRQPSSSRRD

SEQ ID NO: 864 - protein, 16 aa, Homo sapiens
TEEMGSGDYDSMKEPC

SEQ ID NO: 865 - protein, 18 aa, Homo sapiens
KKLRSMTDKYRLHLSVAD

SEQ ID NO: 866 - protein, 20 aa, Homo sapiens
CIIISKLSHSKGHQKRKALK

SEQ ID NO: 867 - protein, 17 aa, Homo sapiens
KILSKGKRGGHSSVSTE

SEQ ID NO: 868 - protein, 20 aa, Homo sapiens
ENRSLENIVQPPGEMNDRLD

SEQ ID NO: 869 - protein, 20 aa, Homo sapiens
KIPSGFPIEDHETSPLDNSD

SEQ ID NO: 870 - protein, 19 aa, Homo sapiens
RKKARQSIQGILEAAFSEE

SEQ ID NO: 871 - protein, 20 aa, Homo sapiens
PQTFQRPSADSLPRGSARLT

SEQ ID NO: 872 - protein, 17 aa, Homo sapiens
DLNTPVDKTSNTLRVPD

SEQ ID NO: 873 - protein, 20 aa, Homo sapiens
CGVDYSHDKRRERAVAIVRL

SEQ ID NO: 874 - protein, 19 aa, Homo sapiens
CYTFILLRTWSRRATRSTK

SEQ ID NO: 875 - protein, 18 aa, Homo sapiens
QGRLRKSLPSLLRNVLTE

SEQ ID NO: 876 - protein, 17 aa, Homo sapiens
AELEESPEDSIQLGVTR

SEQ ID NO: 877 - protein, 17 aa, Homo sapiens
EFVLIPWRPEGKIAEEV

SEQ ID NO: 878 - protein, 19 aa, Homo sapiens
RRNWNQYKIQFGNSFSNSE

SEQ ID NO: 879 - protein, 20 aa, Homo sapiens
RSASYTVSTISDGPGYSHDC

SEQ ID NO: 880 - protein, 17 aa, Homo sapiens
NDIQYEDIKGDMASKLG

SEQ ID NO: 881 - protein, 17 aa, Homo sapiens
KENEENIQCGENFMDIE

SEQ ID NO: 882 - protein, 18 aa, Homo sapiens
EDGKVQVTRPDQARMDIR

SEQ ID NO: 883 - protein, 16 aa, Homo sapiens
CEGTAQPLDNSMGDSD

SEQ ID NO: 884 - protein, 14 aa, Homo sapiens
MKSILDGLADTTFR

SEQ ID NO: 885 - protein, 16 aa, Homo sapiens
NKSLSSFKENEENIQC

SEQ ID NO: 886 - protein, 20 aa, Homo sapiens
KDGLDSNPMKDYMILSGPQK

SEQ ID NO: 887 - protein, 20 aa, Homo sapiens
QDRQVPGMARMRLDVRLAKT

SEQ ID NO: 888 - protein, 17 aa, Homo sapiens
KEEAPRSSVTETEADGK

SEQ ID NO: 889 - protein, 19 aa, Homo sapiens
RSGEIRSSAHHCLAHWKKC

SEQ ID NO: 890 - protein, 19 aa, Homo sapiens
GRDPPAKDVMPGPRQELLC

SEQ ID NO: 891 - protein, 16 aa, Homo sapiens
CSPGYEPVSGAKTFKN

SEQ ID NO: 892 - protein, 15 aa, Homo sapiens
FSSFSEIITTPTETC

SEQ ID NO: 893 - protein, 16 aa, Homo sapiens
CRPGWKPRHGIPNNQK

SEQ ID NO: 894 - protein, 18 aa, Homo sapiens
DGEAGRDPPAKDVMPGPR

SEQ ID NO: 895 - protein, 16 aa, Homo sapiens
ANASLNLHSKKQAELE

SEQ ID NO: 896 - protein, 17 aa, Homo sapiens
RLSAVNSIFLSHNNTKE

SEQ ID NO: 897 - protein, 16 aa, Homo sapiens
KLTQKFSEINPDMKKL

SEQ ID NO: 898 - protein, 16 aa, Homo sapiens
KLVDELMEAPGDVEAL

SEQ ID NO: 899 - protein, 17 aa, Homo sapiens
RFFDKVQDLGRDSKTSS

SEQ ID NO: 900 - protein, 16 aa, Homo sapiens
RAEYLDIESKVINKEC

SEQ ID NO: 901 - protein, 19 aa, Homo sapiens
CVMHSWEGHIRPTRKPNTK

SEQ ID NO: 902 - protein, 21 aa, Homo sapiens
CLLNGQVREEYKRWITGKTKP

SEQ ID NO: 903 - protein, 18 aa, Homo sapiens
CLLNGQVREEYKRWITGK

SEQ ID NO: 904 - protein, 14 aa, Homo sapiens
SGHLSCQGLKASCE

SEQ ID NO: 905 - protein, 16 aa, Homo sapiens
GTALANGTGELSEHQQ

SEQ ID NO: 906 - protein, 16 aa, Homo sapiens
ADSLIEVFNLHERYYD

SEQ ID NO: 907 - protein, 16 aa, Homo sapiens
VRAHRHRGLRPRRQKA

SEQ ID NO: 908 - protein, 20 aa, Homo sapiens
DKLRLYIEQKTNLPALNRFC

SEQ ID NO: 909 - protein, 20 aa, Homo sapiens
AKERKPSTTSSGKYEDSDGC

SEQ ID NO: 910 - protein, 16 aa, Homo sapiens
CYLQKTRPPRKLELRQ

SEQ ID NO: 911 - protein, 16 aa, Homo sapiens
SANAWRAYDTASAERR

SEQ ID NO: 912 - protein, 17 aa, Homo sapiens
CPNPGPPGARGEVGEEE

SEQ ID NO: 913 - protein, 20 aa, Homo sapiens
CEPILDDKQRKYDLHYRIAL

SEQ ID NO: 914 - protein, 15 aa, Homo sapiens
QLVDHEVHESNEVWC

SEQ ID NO: 915 - protein, 20 aa, Homo sapiens
DPEGPYSYCNTTLDQIGTCW

SEQ ID NO: 916 - protein, 18 aa, Homo sapiens
ALLEQYCHTIMTLTNLSG

SEQ ID NO: 917 - protein, 14 aa, Homo sapiens
SSHHEPRGSISKEC

SEQ ID NO: 918 - protein, 20 aa, Homo sapiens
KAKPTSPSDGNATSLAETID

SEQ ID NO: 919 - protein, 15 aa, Homo sapiens
CSQPESSFKMSFKRE

SEQ ID NO: 920 - protein, 17 aa, Homo sapiens
EDLKKEEAAGIARPLEK

SEQ ID NO: 921 - protein, 16 aa, Homo sapiens
PWEEDFWEPDVNAENC

SEQ ID NO: 922 - protein, 16 aa, Homo sapiens
CAPDTSLRASIKKETK

SEQ ID NO: 923 - protein, 16 aa, Homo sapiens
PNAVTPGNREVDNDEE

SEQ ID NO: 924 - protein, 18 aa, Homo sapiens
QTSPDGDPVAESVWELDC

SEQ ID NO: 925 - protein, 19 aa, Homo sapiens
KRSSRAFRAHLRAPLKGNC

SEQ ID NO: 926 - protein, 18 aa, Homo sapiens
CTVIMKSNGSFPVNRRRV

SEQ ID NO: 927 - protein, 16 aa, Homo sapiens
KPEKNGHAKDHPKIAK

SEQ ID NO: 928 - protein, 20 aa, Homo sapiens
GKTRTSLKTMSRRKLSQQKE

SEQ ID NO: 929 - protein, 16 aa, Homo sapiens
KQRRRKRILTRQNSQC

SEQ ID NO: 930 - protein, 17 aa, Homo sapiens
CNSVRPGFPQQTLSPDP

SEQ ID NO: 931 - protein, 17 aa, Homo sapiens
CQDTALGGPGFQERGGE

SEQ ID NO: 932 - protein, 16 aa, Homo sapiens
KREEKTRNSLSPTIAP

SEQ ID NO: 933 - protein, 18 aa, Homo sapiens
STSLKLGPLQPRGVPLRE

SEQ ID NO: 934 - protein, 16 aa, Homo sapiens
VAVAVPLRYNRQGGSR

SEQ ID NO: 935 - protein, 16 aa, Homo sapiens
EVARRAKLHGRAPRRP

SEQ ID NO: 936 - protein, 16 aa, Homo sapiens
PPSPTPPAPRLPQDPC

SEQ ID NO: 937 - protein, 20 aa, Homo sapiens
PPQTPPQTRRRRRAKITGRE

SEQ ID NO: 938 - protein, 17 aa, Homo sapiens
DAYPSAFPSAGANASGP

SEQ ID NO: 939 - protein, 18 aa, Homo sapiens
LVDIDRRDPLVVAALHLC

SEQ ID NO: 940 - protein, 16 aa, Homo sapiens
KRCFRQLCRKPCGRPD

SEQ ID NO: 941 - protein, 15 aa, Homo sapiens
SRPREATARERVTAC

SEQ ID NO: 942 - protein, 16 aa, Homo sapiens
TENSSQLDFEDVWNSS

SEQ ID NO: 943 - protein, 19 aa, Homo sapiens
NDSFPDGDYDANLEAAAPC

SEQ ID NO: 944 - protein, 16 aa, Homo sapiens
CHASLGHRLGAGQVPG

SEQ ID NO: 945 - protein, 16 aa, Homo sapiens
FGAKGLKKALGMGPGP

SEQ ID NO: 946 - protein, 18 aa, Homo sapiens
KQEAERITCMEYPNFEET

SEQ ID NO: 947 - protein, 20 aa, Homo sapiens
KLFRTAKQNPLTEKSGVNKK

SEQ ID NO: 948 - protein, 16 aa, Homo sapiens
KSAPEENSREMTETQM

SEQ ID NO: 949 - protein, 15 aa, Homo sapiens
CKGYKRKVMRMLKRQ

SEQ ID NO: 950 - protein, 19 aa, Homo sapiens
GEERGFPPDRATPLLQTAE

SEQ ID NO: 951 - protein, 18 aa, Homo sapiens
RSLAPAEVPKGDRTAGSP

SEQ ID NO: 952 - protein, 17 aa, Homo sapiens
PRTISPPPCQGPIEIKE

SEQ ID NO: 953 - protein, 19 aa, Homo sapiens
EEKQSLEEKQSCLKFKAND

SEQ ID NO: 954 - protein, 20 aa, Homo sapiens
RYSTNLSNHVDDFTTFRGTE

SEQ ID NO: 955 - protein, 16 aa, Homo sapiens
NRRNGSLRIALSEHLK

SEQ ID NO: 956 - protein, 17 aa, Homo sapiens
EYRGEQHKTCMLNATSK

SEQ ID NO: 957 - protein, 17 aa, Homo sapiens
KNHDQNNHNTDRSSHKD

SEQ ID NO: 958 - protein, 17 aa, Homo sapiens
RPGIEKFREEAEERDIC

SEQ ID NO: 959 - protein, 18 aa, Homo sapiens
CHLQEGAKGPLPVDTFLR

SEQ ID NO: 960 - protein, 20 aa, Homo sapiens
GHEESGDRFSNSSTAFRPLC

SEQ ID NO: 961 - protein, 20 aa, Homo sapiens
KGIIEGEPTCCFECVECPDG

SEQ ID NO: 962 - protein, 20 aa, Homo sapiens
CSTAAHAFKVAARATLRRSN

SEQ ID NO: 963 - protein, 18 aa, Homo sapiens
PQKNAMAHRNSTHQNSLE

SEQ ID NO: 964 - protein, 20 aa, Homo sapiens
RPEVEDPEELSPALVVSSSQ

SEQ ID NO: 965 - protein, 20 aa, Homo sapiens
ASWGGTPEERLKVAITMLTA

SEQ ID NO: 966 - protein, 16 aa, Homo sapiens
SEDSAPTNDTAANSAS

SEQ ID NO: 967 - protein, 18 aa, Homo sapiens
SYESAGYTVLRILPLVVL

SEQ ID NO: 968 - protein, 15 aa, Homo sapiens
PVFLFLTTVTIPNGD

SEQ ID NO: 969 - protein, 20 aa, Homo sapiens
EERLKVAITMLTARGIIRFV

SEQ ID NO: 970 - protein, 20 aa, Homo sapiens
ERALSEDSAPTNDTAANSAS

SEQ ID NO: 971 - protein, 20 aa, Homo sapiens
QESKVTEIPSDLPRNAIELR

SEQ ID NO: 972 - protein, 16 aa, Homo sapiens
DVLEVIEADVFSNLPK

SEQ ID NO: 973 - protein, 17 aa, Homo sapiens
RNGHCSSAPRVTSGSTY

SEQ ID NO: 974 - protein, 20 aa, Homo sapiens
RGQRSSLAEDNESSYSRGFD

SEQ ID NO: 975 - protein, 17 aa, Homo sapiens
CHHRICHCSNRVFLCQE

SEQ ID NO: 976 - protein, 17 aa, Homo sapiens
LRVIQKGAFSGFGDLEK

SEQ ID NO: 977 - protein, 18 aa, Homo sapiens
LYVMSLLVLNVLAFVVIC

SEQ ID NO: 978 - protein, 20 aa, Homo sapiens
CNKSILRQEVDYMTQARGQR

SEQ ID NO: 979 - protein, 17 aa, Homo sapiens
SDNNNLEELPNDVFHGA

SEQ ID NO: 980 - protein, 16 aa, Homo sapiens
KLVALMEASLTYPSHC

SEQ ID NO: 981 - protein, 20 aa, Homo sapiens
SFESVILWLNKNGIQEIHNC

SEQ ID NO: 982 - protein, 19 aa, Homo sapiens
IHSLQKVLLDIQDNINIHT

SEQ ID NO: 983 - protein, 17 aa, Homo sapiens
KANNLLYITPEAFQNLP

SEQ ID NO: 984 - protein, 18 aa, Homo sapiens
CYEMQAQIYRTETSSTVH

SEQ ID NO: 985 - protein, 16 aa, Homo sapiens
TNTPSSRKKMVRRVVC

SEQ ID NO: 986 - protein, 17 aa, Homo sapiens
ARAISASSDQEKHSSRK

SEQ ID NO: 987 - protein, 20 aa, Homo sapiens
KYSAKTGLTKLIDASRVSET

SEQ ID NO: 988 - protein, 19 aa, Homo sapiens
PDTYYLKTVTSASNNETYC

SEQ ID NO: 989 - protein, 18 aa, Homo sapiens
GNSLVITVLARSKPGKPR

SEQ ID NO: 990 - protein, 20 aa, Homo sapiens
PRASNQTFCWEQWPDPRHKK

SEQ ID NO: 991 - protein, 19 aa, Homo sapiens
KKLKNMSKKSEASKKKTAQ

SEQ ID NO: 992 - protein, 14 aa, Homo sapiens
GNSLVITVLARSKP

SEQ ID NO: 993 - protein, 17 aa, Homo sapiens
RKDSHLSDTKENKSRID

SEQ ID NO: 994 - protein, 17 aa, Homo sapiens
QTAGELYQRWERYRREC

SEQ ID NO: 995 - protein, 19 aa, Homo sapiens
CENPEKNEAFLDQRLILER

SEQ ID NO: 996 - protein, 20 aa, Homo sapiens
CRLRRSLGEEQRQLPERAFR

SEQ ID NO: 997 - protein, 18 aa, Homo sapiens
PTSRGLSSGTLPGPGNEA

SEQ ID NO: 998 - protein, 20 aa, Homo sapiens
CNISSHSADLPVNDDWSHPG

SEQ ID NO: 999 - protein, 18 aa, Homo sapiens
SDLHPFHEESTNQTFISC

SEQ ID NO: 1000 - protein, 17 aa, Homo sapiens
YNLPVEGNIHVKKQIES

SEQ ID NO: 1001 - protein, 17 aa, Homo sapiens
CQPGLIIRSHSTGRSTT

SEQ ID NO: 1002 - protein, 19 aa, Homo sapiens
CEPPRIRGAGTRELELAIR

SEQ ID NO: 1003 - protein, 18 aa, Homo sapiens
RVRNQGGLPGAVHQNGRC

SEQ ID NO: 1004 - protein, 16 aa, Homo sapiens
LRFDGDSDSDSQSRVR

SEQ ID NO: 1005 - protein, 16 aa, Homo sapiens [sequence omitted]

SEQ ID NO: 1006 - protein, 16 aa, Homo sapiens
DGLLRTRYSQKIGDDL

SEQ ID NO: 1007 - protein, 20 aa, Homo sapiens
CGPDGQWVRGPRGQPWRDAS

SEQ ID NO: 1008 - protein, 20 aa, Homo sapiens
CQMDGEEIEVQKEVAKMYSS

SEQ ID NO: 1009 - protein, 18 aa, Homo sapiens
TSNHRASSSPGHGPPSKE

SEQ ID NO: 1010 - protein, 19 aa, Homo sapiens
KLQKWTQKKEKGKKLSRMK

SEQ ID NO: 1011 - protein, 20 aa, Homo sapiens
DRSLAITRPLALKSNSKVGQ

SEQ ID NO: 1012 - protein, 18 aa, Homo sapiens
RMIHLADSSGQTKVFSQC

SEQ ID NO: 1013 - protein, 20 aa, Homo sapiens
DPHELQLNQSKNNIPRARLK

SEQ ID NO: 1014 - protein, 19 aa, Homo sapiens
QRLAGRHPQDSYEDSTQSS

SEQ ID NO: 1015 - protein, 17 aa, Homo sapiens
CKPFGNVRFDAKLAIVG

SEQ ID NO: 1016 - protein, 19 aa, Homo sapiens
KTSCGPDVFSGSSYPGVQS

SEQ ID NO: 1017 - protein, 18 aa, Homo sapiens
CILQLFGKKVDDGSELSS

SEQ ID NO: 1018 - protein, 16 aa, Homo sapiens
STRGPFEGPNYHIAPR

SEQ ID NO: 1019 - protein, 16 aa, Homo sapiens
TNGLVLAATMKFKKLR

SEQ ID NO: 1020 - protein, 18 aa, Homo sapiens
ELSSASKTEVSSVSSVSP

SEQ ID NO: 1021 - protein, 16 aa, Homo sapiens
ADLDWDASPGNDSLGD

SEQ ID NO: 1022 - protein, 16 aa, Homo sapiens
GVEHENGTDPWDTNEC

SEQ ID NO: 1023 - protein, 16 aa, Homo sapiens
KLWRRRRGDAVVGASL

SEQ ID NO: 1024 - protein, 16 aa, Homo sapiens
SQRKLSTLKDESSRAW

SEQ ID NO: 1025 - protein, 20 aa, Homo sapiens
REDESACLQAAEEMPNTTLG

SEQ ID NO: 1026 - protein, 18 aa, Homo sapiens
CPDFFSHFSSESGAVKRD

SEQ ID NO: 1027 - protein, 16 aa, Homo sapiens
VRKLEPAQGSLHTQSQ

SEQ ID NO: 1028 - protein, 16 aa, Homo sapiens
RTEISRKWHGHDPELL

SEQ ID NO: 1029 - protein, 17 aa, Homo sapiens
GWNHFMQQTSVRREDKC

SEQ ID NO: 1030 - protein, 20 aa, Homo sapiens
CQHRELINRSLPSFSEIKLR

SEQ ID NO: 1031 - protein, 16 aa, Homo sapiens
AGGGSVLKSPSQTPKE

SEQ ID NO: 1032 - protein, 19 aa, Homo sapiens
KSPVVFSQEDDREVDKLYC

SEQ ID NO: 1033 - protein, 17 aa, Homo sapiens
TAPGKGKLRSGSNTGLD

SEQ ID NO: 1034 - protein, 19 aa, Homo sapiens
KRLRSHSRQYVSGLHMNRE

SEQ ID NO: 1035 - protein, 16 aa, Homo sapiens
NSRNETSKGNHTTSKC

SEQ ID NO: 1036 - protein, 17 aa, Homo sapiens
CITYYRIFKVARDQAKR

SEQ ID NO: 1037 - protein, 16 aa, Homo sapiens
RDQAKRINHISSWKAA

SEQ ID NO: 1038 - protein, 16 aa, Homo sapiens
TAFVYRGLRGDDAINE

SEQ ID NO: 1039 - protein, 19 aa, Homo sapiens
HKTSLRSNASQLSRTQSRE

SEQ ID NO: 1040 - protein, 16 aa, Homo sapiens
DSNGSAGSEDAQLEPA

SEQ ID NO: 1041 - protein, 19 aa, Homo sapiens
KVREDVDVIECSLQFPDDD

SEQ ID NO: 1042 - protein, 18 aa, Homo sapiens
RNTVQDPAYLRDIDGMNK

SEQ ID NO: 1043 - protein, 18 aa, Homo sapiens
CFPLKMRMERQSTSRVRN

SEQ ID NO: 1044 - protein, 20 aa, Homo sapiens
CNTGIRKFPDVTKVFSSESN

SEQ ID NO: 1045 - protein, 17 aa, Homo sapiens
KMHNGAFRGATGPKTLD

SEQ ID NO: 1046 - protein, 16 aa, Homo sapiens
CESTVRKVSNKTLYSS

SEQ ID NO: 1047 - protein, 16 aa, Homo sapiens
FAVRNPELMATNKDTK

SEQ ID NO: 1048 - protein, 19 aa, Homo sapiens
CKRRAELYRRKDFSAYTSN

SEQ ID NO: 1049 - protein, 19 aa, Homo sapiens
ERHITVFRMQLHTRMSNRR

SEQ ID NO: 1050 - protein, 19 aa, Homo sapiens
RQRTMRMSRHSSGPRRNRD

SEQ ID NO: 1051 - protein, 15 aa, Homo sapiens
KHLATEWNTVSKLVM

SEQ ID NO: 1052 - protein, 18 aa, Homo sapiens
ENPTGPTESSDRSASSLN

SEQ ID NO: 1053 - protein, 20 aa, Homo sapiens
ESQISLSCSLCLHSGDQEAQ

SEQ ID NO: 1054 - protein, 18 aa, Homo sapiens
QQQKATRVYAVVQISAPM

SEQ ID NO: 1055 - protein, 18 aa, Homo sapiens
DKPEVGRNKKAAGIDPME

SEQ ID NO: 1056 - protein, 20 aa, Homo sapiens
EQPHSTQHVENLLPREHRVD

SEQ ID NO: 1057 - protein, 19 aa, Homo sapiens
RLHVKRIAALPPADGVAPQ

SEQ ID NO: 1058 - protein, 18 aa, Homo sapiens
DPLIYAFRSLELRNTFRE

SEQ ID NO: 1059 - protein, 19 aa, Homo sapiens
QAPFFSNQSSSAFCEQVFI

SEQ ID NO: 1060 - protein, 20 aa, Homo sapiens
IVHSDYLTFEDQFIQHMDNI

SEQ ID NO: 1061 - protein, 17 aa, Homo sapiens
HSNASESLGKGYSDGGC

SEQ ID NO: 1062 - protein, 16 aa, Homo sapiens
KRIAVLPGTGAIRQGA

SEQ ID NO: 1063 - protein, 16 aa, Homo sapiens
NSTDTDAQSFTVNIDN

SEQ ID NO: 1064 - protein, 20 aa, Homo sapiens
NSTHRGMHTSLHLWNRSSYR

SEQ ID NO: 1065 - protein, 18 aa, Homo sapiens
ATEGNLSGPNVKNKSSPC

SEQ ID NO: 1066 - protein, 16 aa, Homo sapiens
NKHLVIADAFVRHIDN

SEQ ID NO: 1067 - protein, 17 aa, Homo sapiens
MNSSFHLHFLDLNLNAT

SEQ ID NO: 1068 - protein, 17 aa, Homo sapiens
RYHHIMTARRSGAIIAG

SEQ ID NO: 1069 - protein, 16 aa, Homo sapiens
QGSQRRLLGSLNSTPT

SEQ ID NO: 1070 - protein, 16 aa, Homo sapiens
EAGALVARAAVLQQLD

SEQ ID NO: 1071 - protein, 16 aa, Homo sapiens
ALRYHSIVTLPRARQA

SEQ ID NO: 1072 - protein, 16 aa, Homo sapiens
CQHAQGIARLHKRQRP

SEQ ID NO: 1073 - protein, 16 aa, Homo sapiens
HSLKYDKLYSSKNSLC

SEQ ID NO: 1074 - protein, 17 aa, Homo sapiens
CTARVFFVDSSNDVADR

SEQ ID NO: 1075 - protein, 16 aa, Homo sapiens
QVRQRVKPDRKPKLKP

SEQ ID NO: 1076 - protein, 20 aa, Homo sapiens
DSSNDVADRVKWKPSPLMTN

SEQ ID NO: 1077 - protein, 16 aa, Homo sapiens
AVRPGWSGAGSARPSR

SEQ ID NO: 1078 - protein, 16 aa, Homo sapiens
LVAIFYDGWALGEEHC

SEQ ID NO: 1079 - protein, 16 aa, Homo sapiens
LVLQARRKAKPESRLC

SEQ ID NO: 1080 - protein, 18 aa, Homo sapiens
CIQDASKGSHAEGLQSPA

SEQ ID NO: 1081 - protein, 16 aa, Homo sapiens
QEMAPQIPEGLFVTSY

SEQ ID NO: 1082 - protein, 17 aa, Homo sapiens
LAARDPAGQNPDNQLAE

SEQ ID NO: 1083 - protein, 20 aa, Homo sapiens
ARARAHARDQAREQDRAHAC

SEQ ID NO: 1084 - protein, 17 aa, Homo sapiens
DRASGHPKPHSRSSSAY

SEQ ID NO: 1085 - protein, 17 aa, Homo sapiens
HPKPAAADNPELSASHC

SEQ ID NO: 1086 - protein, 17 aa, Homo sapiens
DDSDLPESASSPAAGPT

SEQ ID NO: 1087 - protein, 17 aa, Homo sapiens
DDYKIQMNKSGVVRSVC

SEQ ID NO: 1088 - protein, 16 aa, Homo sapiens
CRSNTFLNIFRRKKAG

SEQ ID NO: 1089 - protein, 16 aa, Homo sapiens
DTSTKTLYNVEEEEDA

SEQ ID NO: 1090 - protein, 16 aa, Homo sapiens
ERFKLLQEYVYEHERE

SEQ ID NO: 1091 - protein, 18 aa, Homo sapiens
DFVRASLSRGADGSRHIC

SEQ ID NO: 1092 - protein, 19 aa, Homo sapiens
CVATSEKVGRAMSRAAFEG

SEQ ID NO: 1093 - protein, 16 aa, Homo sapiens
CAAHSLRAVPFEQESK

SEQ ID NO: 1094 - protein, 16 aa, Homo sapiens
CDAMRPVNGRRLYKDF

SEQ ID NO: 1095 - protein, 17 aa, Homo sapiens
DAPFRPADTHNEVRFDR

SEQ ID NO: 1096 - protein, 16 aa, Homo sapiens
GKETAPERREVVTLRC

SEQ ID NO: 1097 - protein, 16 aa, Homo sapiens
GGLFPINEKGTGTEEC

SEQ ID NO: 1098 - protein, 17 aa, Homo sapiens
EFVRASLTKVDEAEYMC

SEQ ID NO: 1099 - protein, 16 aa, Homo sapiens
RSNIRKSYDSVIRELL

SEQ ID NO: 1100 - protein, 16 aa, Homo sapiens
CDKHLAIDSSNYEQES

SEQ ID NO: 1101 - protein, 18 aa, Homo sapiens
GTRRYTLAEKRETVILKC

SEQ ID NO: 1102 - protein, 19 aa, Homo sapiens
PSSLGKPKGHPHMNSIRID

SEQ ID NO: 1103 - protein, 17 aa, Homo sapiens
CGSGGPPIITKPERVVG

SEQ ID NO: 1104 - protein, 16 aa, Homo sapiens
CKLSRHALKKGSHVKK

SEQ ID NO: 1105 - protein, 16 aa, Homo sapiens
CPRMDPVDGTQLLKYI

SEQ ID NO: 1106 - protein, 19 aa, Homo sapiens
RIERMHWPGSGQQLPRSIC

SEQ ID NO: 1107 - protein, 17 aa, Homo sapiens
KDYFDYINVGSWDNGEL

SEQ ID NO: 1108 - protein, 19 aa, Homo sapiens
KMDDDEVWSKKSNIIRSVC

SEQ ID NO: 1109 - protein, 20 aa, Homo sapiens
GETLRYKDRRLAQHKSEIEC

SEQ ID NO: 1110 - protein, 16 aa, Homo sapiens
NPNQTAVIKPFPKSTE

SEQ ID NO: 1111 - protein, 17 aa, Homo sapiens
KALYDVAEAEEHFPAPA

SEQ ID NO: 1112 - protein, 20 aa, Homo sapiens
RSPSPISTLSHRAGSASRTD

SEQ ID NO: 1113 - protein, 16 aa, Homo sapiens
RESPAAGPEAAAAKPD

SEQ ID NO: 1114 - protein, 17 aa, Homo sapiens
QALIRGRGDGDEVGVRC

SEQ ID NO: 1115 - protein, 16 aa, Homo sapiens
KLTSSGTQSDDSTRKC

SEQ ID NO: 1116 - protein, 19 aa, Homo sapiens
DVEALQWSGDPHEVPSSLC

SEQ ID NO: 1117 - protein, 16 aa, Homo sapiens
RFQVDEFTCEACPGDM

SEQ ID NO: 1118 - protein, 16 aa, Homo sapiens
GARPPHSVIDYEEQRT

SEQ ID NO: 1119 - protein, 20 aa, Homo sapiens
CIAQSVRIPQERKDRTIDFD

SEQ ID NO: 1120 - protein, 16 aa, Homo sapiens
NDEDIKQILAAAKRAD

SEQ ID NO: 1121 - protein, 19 aa, Homo sapiens
NIEDMQWGKGVREIPASVC

SEQ ID NO: 1122 - protein, 15 aa, Homo sapiens
IKQLLDTPNSRAVVI

SEQ ID NO: 1123 - protein, 15 aa, Homo sapiens
DPPNIIIDYDEHKTM

SEQ ID NO: 1124 - protein, 16 aa, Homo sapiens
CANGDPPIFTKPDKIS

SEQ ID NO: 1125 - protein, 18 aa, Homo sapiens
CPRMSTIDGKELLGYIRA

SEQ ID NO: 1126 - protein, 19 aa, Homo sapiens
KVEDMQWAHREHTHPASVC

SEQ ID NO: 1127 - protein, 19 aa, Homo sapiens
CESLETNTSSTKTTYISYS

SEQ ID NO: 1128 - protein, 20 aa, Homo sapiens
KFYWILTMMQRTHSQEYAHS

SEQ ID NO: 1129 - protein, 20 aa, Homo sapiens
DGNLSDPCGPNRTNLGGRDS

SEQ ID NO: 1130 - protein, 18 aa, Homo sapiens
DRTNHQLENLEAETAPLP

SEQ ID NO: 1131 - protein, 16 aa, Homo sapiens
IKALVTIPETTFQTVS

SEQ ID NO: 1132 - protein, 18 aa, Homo sapiens
RIRQNTRDHPSTANTVDR

SEQ ID NO: 1133 - protein, 19 aa, Homo sapiens
SERSQPGAEGSPETPPGRC

SEQ ID NO: 1134 - protein, 16 aa, Homo sapiens
CRAPRLLQAYSWKEEE

SEQ ID NO: 1135 - protein, 16 aa, Homo sapiens
SSEGEEPGSEVVIKMP

SEQ ID NO: 1136 - protein, 20 aa, Homo sapiens
KQPPRSSPNTVKRPTKKGRD

SEQ ID NO: 1137 - protein, 17 aa, Homo sapiens
CRWDKRRWRKIPKRPGS

SEQ ID NO: 1138 - protein, 19 aa, Homo sapiens
EHNKIQNGKAPRDPVTENC

SEQ ID NO: 1139 - protein, 16 aa, Homo sapiens
DSTSVSAVASNMRDDE

SEQ ID NO: 1140 - protein, 20 aa, Homo sapiens
ENTVSTSLGHSKDENSKQTC

SEQ ID NO: 1141 - protein, 16 aa, Homo sapiens
DEKQNIVARKIVKMTK

SEQ ID NO: 1142 - protein, 20 aa, Homo sapiens
RIKKDKKEPVANQDPVSPSL

SEQ ID NO: 1143 - protein, 20 aa, Homo sapiens
SRSRVHKHRPEGPKEKKAKT

SEQ ID NO: 1144 - protein, 20 aa, Homo sapiens
KKPRPGGRPGGLRNGKLEEA

SEQ ID NO: 1145 - protein, 20 aa, Homo sapiens
DKDTSNESSSGSATQNTKER

SEQ ID NO: 1146 - protein, 20 aa, Homo sapiens
RPAANVARKFASIARNQVRK

SEQ ID NO: 1147 - protein, 16 aa, Homo sapiens
KAEKRKPAHRALFRSC

SEQ ID NO: 1148 - protein, 16 aa, Homo sapiens
CSSYPSSEDEDKPATD

SEQ ID NO: 1149 - protein, 18 aa, Homo sapiens
KESPGEEFSAEETEETFV

SEQ ID NO: 1150 - protein, 18 aa, Homo sapiens
KFRLVVKADGNQETNNGC

SEQ ID NO: 1151 - protein, 16 aa, Homo sapiens
KEPSTKGLNPNPSHQM

SEQ ID NO: 1152 - protein, 16 aa, Homo sapiens
PAAETWIDGGGGVGAD

SEQ ID NO: 1153 - protein, 18 aa, Homo sapiens
PSQPWANLTNQFVQPSWR

SEQ ID NO: 1154 - protein, 16 aa, Homo sapiens
SRKKRATPRDPSFNGC

SEQ ID NO: 1155 - protein, 15 aa, Homo sapiens
ADAVNLTASLAAGAA

SEQ ID NO: 1156 - protein, 17 aa, Homo sapiens
SPSALGLPVASPAPSQP

SEQ ID NO: 1157 - protein, 19 aa, Homo sapiens
ERDFLPASDGTTTELVIRC

SEQ ID NO: 1158 - protein, 16 aa, Homo sapiens
KTLIKSAHNLPGEYNE

SEQ ID NO: 1159 - protein, 17 aa, Homo sapiens
SEVARISSLDNSSFTAC

SEQ ID NO: 1160 - protein, 19 aa, Homo sapiens
CGRKSYQERGTSYLLSSSA

SEQ ID NO: 1161 - protein, 16 aa, Homo sapiens
RGELVPDPEPELIDST

SEQ ID NO: 1162 - protein, 16 aa, Homo sapiens
CIVYHLESKISKRISF

SEQ ID NO: 1163 - protein, 17 aa, Homo sapiens
REYSLIEIIPDFEIVAC

SEQ ID NO: 1164 - protein, 17 aa, Homo sapiens
NDHYHQRRQKTTKMLVC

SEQ ID NO: 1165 - protein, 20 aa, Homo sapiens
CEQRLDAIHSEVSVTFKAKK

SEQ ID NO: 1166 - protein, 20 aa, Homo sapiens
MGPIGAEADENQTVEEMKVE

SEQ ID NO: 1167 - protein, 20 aa, Homo sapiens
SEVSVTFKAKKNLEVRKNSG

SEQ ID NO: 1168 - protein, 16 aa, Homo sapiens
CVTVRQKEKANVTNLL

SEQ ID NO: 1169 - protein, 16 aa, Homo sapiens
KNHSKALEFLADKVVC

SEQ ID NO: 1170 - protein, 19 aa, Homo sapiens
CYARIYRRLQRQGRVFHKG

SEQ ID NO: 1171 - protein, 17 aa, Homo sapiens
CQQSAPLEESEHLPLST

SEQ ID NO: 1172 - protein, 17 aa, Homo sapiens
SEHCQDSVDVMVFIVTS

SEQ ID NO: 1173 - protein, 16 aa, Homo sapiens
MKKRNQKTTVNFLIGN

SEQ ID NO: 1174 - protein, 16 aa, Homo sapiens
CGLSNKENRLEENEMI

SEQ ID NO: 1175 - protein, 16 aa, Homo sapiens
NLTLHPSKKSGPQVKL

SEQ ID NO: 1176 - protein, 16 aa, Homo sapiens
SFIKKHRRRYSKKTAC

SEQ ID NO: 1177 - protein, 16 aa, Homo sapiens
PERPSQENHSRILPEN

SEQ ID NO: 1178 - protein, 17 aa, Homo sapiens
CFEIKPEENSDVHELRV

SEQ ID NO: 1179 - protein, 18 aa, Homo sapiens
RVLAAPSSELDVNTDIYS

SEQ ID NO: 1180 - protein, 17 aa, Homo sapiens
CHPFKAKTLMSRSRTKK

SEQ ID NO: 1181 - protein, 17 aa, Homo sapiens
GEQNRSADGQHAGGLVC

SEQ ID NO: 1182 - protein, 17 aa, Homo sapiens
RQAAEQGQVCTVGGEHS

SEQ ID NO: 1183 - protein, 19 aa, Homo sapiens
CPVWRRRRKRPAFSRKADS

SEQ ID NO: 1184 - protein, 17 aa, Homo sapiens
CHPIRALDVRTSSKAQA

SEQ ID NO: 1185 - protein, 17 aa, Homo sapiens
PVAIMGSAQVEDEEIEC

SEQ ID NO: 1186 - protein, 16 aa, Homo sapiens
GVQPSSETAVAILRFC

SEQ ID NO: 1187 - protein, 20 aa, Homo sapiens
CASALRRDVQVSDRVRSIAK

SEQ ID NO: 1188 - protein, 20 aa, Homo sapiens
TPEPRPRTQPMASPRLGTFC

SEQ ID NO: 1189 - protein, 16 aa, Homo sapiens
TAVASLLKGRQGIYTE

SEQ ID NO: 1190 - protein, 19 aa, Homo sapiens
EMQTDINGGSLKPVRTAAK

SEQ ID NO: 1191 - protein, 16 aa, Homo sapiens
CSLGFQSPRKEIQWES

SEQ ID NO: 1192 - protein, 18 aa, Homo sapiens
SEGSDASTIEIHTASESC

SEQ ID NO: 1193 - protein, 16 aa, Homo sapiens
NPASGKVSQVGGQTSD

SEQ ID NO: 1194 - protein, 20 aa, Homo sapiens
CKKLHIPLKAQNDLDISRIK

SEQ ID NO: 1195 - protein, 20 aa, Homo sapiens
KIVKPLWTSFIQSVSYSKLL

SEQ ID NO: 1196 - protein, 20 aa, Homo sapiens
TAITKKIFKSHLKSSRNSTS

SEQ ID NO: 1197 - protein, 19 aa, Homo sapiens
VKKKSSRNIFSIVFVFFVC

SEQ ID NO: 1198 - protein, 20 aa, Homo sapiens
AEGNRTAGPPRRNEALARVE

SEQ ID NO: 1199 - protein, 17 aa, Homo sapiens
RLAVLATWLGCLVASAP

SEQ ID NO: 1200 - protein, 16 aa, Homo sapiens
PEGAAAGDGGRVALAR

SEQ ID NO: 1201 - protein, 20 aa, Homo sapiens
YLKGRRLGETSASKKSNSSS

SEQ ID NO: 1202 - protein, 16 aa, Homo sapiens
MQRIGDVLGSSEDFRR

SEQ ID NO: 1203 - protein, 16 aa, Homo sapiens
ARGGRVTCHDTSAPEL

SEQ ID NO: 1204 - protein, 16 aa, Homo sapiens
KPAYGTSGGLPRAKRK

SEQ ID NO: 1205 - protein, 19 aa, Homo sapiens
TGPSPATPARRRLGLRRSD

SEQ ID NO: 1206 - protein, 19 aa, Homo sapiens
RYSGVVYPLKSLGRLKKKN

SEQ ID NO: 1207 - protein, 15 aa, Homo sapiens
SGTGVRKNKTITCYD

SEQ ID NO: 1208 - protein, 17 aa, Homo sapiens
RALIYKDLDNSPLRRKS

SEQ ID NO: 1209 - protein, 19 aa, Homo sapiens
DTFRRRLSRATRKASRRSE

SEQ ID NO: 1210 - protein, 16 aa, Homo sapiens
FVQSTHSQGNNASEAC

SEQ ID NO: 1211 - protein, 17 aa, Homo sapiens
MVLKTLTKPVTLSRSKI

SEQ ID NO: 1212 - protein, 17 aa, Homo sapiens
TIQNSIKMKNWSVRRSD

SEQ ID NO: 1213 - protein, 18 aa, Homo sapiens
SEVHGAENFIQHNLQTLK

SEQ ID NO: 1214 - protein, 16 aa, Homo sapiens
CTSRRALTRTAVYTLN

SEQ ID NO: 1215 - protein, 15 aa, Homo sapiens
AQERRGKAARMAVVV

SEQ ID NO: 1216 - protein, 16 aa, Homo sapiens
TKTAYLAVRSTPGVPC

SEQ ID NO: 1217 - protein, 17 aa, Homo sapiens
KKFRRRPHELLQKLTAK

SEQ ID NO: 1218 - protein, 17 aa, Homo sapiens
CHPLAPWHKRGGRRAAW

SEQ ID NO: 1219 - protein, 16 aa, Homo sapiens
CFRMKMRSETAIFITN

SEQ ID NO: 1220 - protein, 17 aa, Homo sapiens
RTLRKPATLSQIGTNKK

SEQ ID NO: 1221 - protein, 17 aa, Homo sapiens
ESFQKSFYINAHIRMES

SEQ ID NO: 1222 - protein, 18 aa, Homo sapiens
KTETPLTTKPSLPAIQEE

SEQ ID NO: 1223 - protein, 19 aa, Homo sapiens
SSLRPRLGNATANNTCIVD

SEQ ID NO: 1224 - protein, 18 aa, Homo sapiens
KAKVQCELNITAQLQEGE

SEQ ID NO: 1225 - protein, 20 aa, Homo sapiens
ESLIMQDDPQNSIEATSVDK

SEQ ID NO: 1226 - protein, 17 aa, Homo sapiens
NSEQDCLPHSFHEETKE

SEQ ID NO: 1227 - protein, 20 aa, Homo sapiens
EETKEDSGRQGDDILMEKPS

SEQ ID NO: 1228 - protein, 20 aa, Homo sapiens
CEKRLKEVLQRPASIMESDK

SEQ ID NO: 1229 - protein, 19 aa, Homo sapiens
ESEEDKEAPTGSRYRGRPC

SEQ ID NO: 1230 - protein, 19 aa, Homo sapiens
LYSGATLDEAERLTEEELR

SEQ ID NO: 1231 - protein, 19 aa, Homo sapiens
KDDGFLNGSCSGLDEEASG

SEQ ID NO: 1232 - protein, 18 aa, Homo sapiens
CLEKIQRANELMGFNDSS

SEQ ID NO: 1233 - protein, 18 aa, Homo sapiens
CPELFRIFNPDQVWETET

SEQ ID NO: 1234 - protein, 17 aa, Homo sapiens
DSNSLDLSDMGVVSRNC

SEQ ID NO: 1235 - protein, 17 aa, Homo sapiens
IKRKWRSWKVNRYFAVD

SEQ ID NO: 1236 - protein, 20 aa, Homo sapiens
ESDFGDSNSLDLSDMGVVSR

SEQ ID NO: 1237 - protein, 14 aa, Homo sapiens
RTTGDLENTTKVQC

SEQ ID NO: 1238 - protein, 16 aa, Homo sapiens
RSSREKRRSADIFIAS

SEQ ID NO: 1239 - protein, 20 aa, Homo sapiens
QTIAGHFRKERIEGLRKRRR

SEQ ID NO: 1240 - protein, 20 aa, Homo sapiens
GPNMGKGGEQMHEKSIPYSQ

SEQ ID NO: 1241 - protein, 19 aa, Homo sapiens
RMEDEDYNTSISYGDEYPD

SEQ ID NO: 1242 - protein, 18 aa, Homo sapiens
DSIVVLEDLSPLEARVTR

SEQ ID NO: 1243 - protein, 20 aa, Homo sapiens
LTIVCKLHRNRLAKTKKPFK

SEQ ID NO: 1244 - protein, 19 aa, Homo sapiens
RSFTKMSSMNERTSMNERE

SEQ ID NO: 1245 - protein, 20 aa, Homo sapiens
TRSRRLTFRKNISKASRSSE

SEQ ID NO: 1246 - protein, 17 aa, Homo sapiens
CPSGDSAGKFKRPIIAG

SEQ ID NO: 1247 - protein, 19 aa, Homo sapiens
CPSGDSAGKFKRPIIAGME

SEQ ID NO: 1248 - protein, 16 aa, Homo sapiens
RSKSDNSSHPQKDEGD

SEQ ID NO: 1249 - protein, 16 aa, Homo sapiens
ERHLTMIKMRPYDANK

SEQ ID NO: 1250 - protein, 16 aa, Homo sapiens
LVKSSSRKVANHNNSE

SEQ ID NO: 1251 - protein, 16 aa, Homo sapiens
SPKVKEDLPHTDPSSC

SEQ ID NO: 1252 - protein, 18 aa, Homo sapiens
CLVRGRGARASPIQPALD

SEQ ID NO: 1253 - protein, 19 aa, Homo sapiens
REHYQYVGKLAGRLKEASE

SEQ ID NO: 1254 - protein, 17 aa, Homo sapiens
RAHTWREKRLLYSKMVC

SEQ ID NO: 1255 - protein, 19 aa, Homo sapiens
KEESGIAICTMVYPSDEST

SEQ ID NO: 1256 - protein, 16 aa, Homo sapiens
QAKKSSKHKALKVTIT

SEQ ID NO: 1257 - protein, 17 aa, Homo sapiens
GERFRRDLVKTLKNLGC

SEQ ID NO: 1258 - protein, 19 aa, Homo sapiens
ENYSYDLDYYSLESDLEEK

SEQ ID NO: 1259 - protein, 20 aa, Homo sapiens
RDTVEFNNHTLCYNNFQKHD

SEQ ID NO: 1260 - protein, 17 aa, Homo sapiens
SKKFQARFRSSVAEILK

SEQ ID NO: 1261 - protein, 16 aa, Homo sapiens
GTVSEQLRNSETKNLC

SEQ ID NO: 1262 - protein, 16 aa, Homo sapiens
HPLRRRISLRLSAYAV

SEQ ID NO: 1263 - protein, 16 aa, Homo sapiens
CEEFWGSQERQRQLYA

SEQ ID NO: 1264 - protein, 17 aa, Homo sapiens
SYVRVSVKLRNRVVPGC

SEQ ID NO: 1265 - protein, 16 aa, Homo sapiens
CVTQSQADWDRARRRR

SEQ ID NO: 1266 - protein, 19 aa, Homo sapiens
DSFREELRKLLVAWPRKIA

SEQ ID NO: 1267 - protein, 16 aa, Homo sapiens
GCIPSSLAQRARSPSD

SEQ ID NO: 1268 - protein, 19 aa, Homo sapiens
ENISAAVSSRVPAVEPEPE

SEQ ID NO: 1269 - protein, 15 aa, Homo sapiens
STCSVVRPLTKNNAA

SEQ ID NO: 1270 - protein, 16 aa, Homo sapiens
QSEATKLVTIGLIVAS

SEQ ID NO: 1271 - protein, 17 aa, Homo sapiens
KQKENECLGDYPEVLQE

SEQ ID NO: 1272 - protein, 15 aa, Homo sapiens
SMNNRTVQHGVTISL

SEQ ID NO: 1273 - protein, 19 aa, Homo sapiens
ETLKLYDFFPSCDMRKDLR

SEQ ID NO: 1274 - protein, 20 aa, Homo sapiens
GRSVHVDFSSSESQRSRHGS

SEQ ID NO: 1275 - protein, 20 aa, Homo sapiens
CLKNYDFGSSTETSDSHLTK

SEQ ID NO: 1276 - protein, 19 aa, Homo sapiens
KALSTFIHAEDFARRRKRS

SEQ ID NO: 1277 - protein, 16 aa, Homo sapiens
ATSPNSDIRETHSHVP

SEQ ID NO: 1278 - protein, 16 aa, Homo sapiens
LMGALHFKPGSRRLID

SEQ ID NO: 1279 - protein, 19 aa, Homo sapiens
GLPTLLSRELTLIDDKPYC

SEQ ID NO: 1280 - protein, 19 aa, Homo sapiens
DRYMAIVQPKYAKELKNTC

SEQ ID NO: 1281 - protein, 17 aa, Homo sapiens
KDPDKDSTPATCLKISD

SEQ ID NO: 1282 - protein, 16 aa, Homo sapiens
GRTSKLKPKVKEKSIR

SEQ ID NO: 1283 - protein, 18 aa, Homo sapiens
RNYLRSLRRKSFRSGSLR

SEQ ID NO: 1284 - protein, 18 aa, Homo sapiens
KVSREKAKKMIAASWIFD

SEQ ID NO: 1285 - protein, 18 aa, Homo sapiens
DGRTVRRTMNIVPRTKVK

SEQ ID NO: 1286 - protein, 15 aa, Homo sapiens
RRGMKETFCMSSMKC

SEQ ID NO: 1287 - protein, 20 aa, Homo sapiens
KTITKDSIYDSFDREAKEKK

SEQ ID NO: 1288 - protein, 16 aa, Homo sapiens
ALLFSQDGQREGQRRC

SEQ ID NO: 1289 - protein, 17 aa, Homo sapiens
SGDEEDAYSAEPLPELC

SEQ ID NO: 1290 - protein, 17 aa, Homo sapiens
ALLLDTADLLAARERSC

SEQ ID NO: 1291 - protein, 19 aa, Homo sapiens
RRLLRGGSSPSGPQPRRGC

SEQ ID NO: 1292 - protein, 18 aa, Homo sapiens
KGSGRHHILSAGPHALTQ

SEQ ID NO: 1293 - protein, 20 aa, Homo sapiens
RTNASGLEVPLFHLFARLDE

SEQ ID NO: 1294 - protein, 18 aa, Homo sapiens
SRPGLLHQGRQRRVRAMQ

SEQ ID NO: 1295 - protein, 20 aa, Homo sapiens
GQHGEREPSSGDVVSMHRSS

SEQ ID NO: 1296 - protein, 20 aa, Homo sapiens
SERQARFSSQSGETGEVQAC

SEQ ID NO: 1297 - protein, 14 aa, Homo sapiens
DPYTVRSKGPLNGC

SEQ ID NO: 1298 - protein, 16 aa, Homo sapiens
NSTLDGNQSSHPFCLL

SEQ ID NO: 1299 - protein, 16 aa, Homo sapiens
CASQTTANDPYTVRSK

SEQ ID NO: 1300 - protein, 18 aa, Homo sapiens
EINMQSESNITVRDDIDD

SEQ ID NO: 1301 - protein, 20 aa, Homo sapiens
RRAVKRHRERRERQKRVFRM

SEQ ID NO: 1302 - protein, 16 aa, Homo sapiens
TRQKFQKVLKSKMKKR

SEQ ID NO: 1303 - protein, 19 aa, Homo sapiens
DPKRNKKITFEDSEIREKR

SEQ ID NO: 1304 - protein, 20 aa, Homo sapiens
CAPGQGGRRWRLPQPAWVEG

SEQ ID NO: 1305 - protein, 20 aa, Homo sapiens
EASLLPTGPNASNTSDGPDN

SEQ ID NO: 1306 - protein, 19 aa, Homo sapiens
KGVGRAVGLGGGSGCQATE

SEQ ID NO: 1307 - protein, 20 aa, Homo sapiens
RMTSSVAPASQRSIRLRTKR

SEQ ID NO: 1308 - protein, 18 aa, Homo sapiens
RAVSNAQTADEERTESKG

SEQ ID NO: 1309 - protein, 18 aa, Homo sapiens
RGLQPLPGGQDSQCGEEP

SEQ ID NO: 1310 - protein, 20 aa, Homo sapiens
CRISRRLRRPPHVGRARRNS

SEQ ID NO: 1311 - protein, 19 aa, Homo sapiens
RTGRLARRISSASSLSRDD

SEQ ID NO: 1312 - protein, 18 aa, Homo sapiens
DYSGLDGLEELELCPAGD

SEQ ID NO: 1313 - protein, 16 aa, Homo sapiens
TVYCLLGDAHSPPLYT

SEQ ID NO: 1314 - protein, 17 aa, Homo sapiens
EGPTGPAAPLPSPKAWD

SEQ ID NO: 1315 - protein, 15 aa, Homo sapiens
HFAAVFCIGSAEMSL

SEQ ID NO: 1316 - protein, 15 aa, Homo sapiens
GLTTCGVVYPLSKNH

SEQ ID NO: 1317 - protein, 19 aa, Homo sapiens
REPEKQPKLQRAQALVTLV

SEQ ID NO: 1318 - protein, 19 aa, Homo sapiens
CHSFYSRADGSFSIIWQEA

SEQ ID NO: 1319 - protein, 20 aa, Homo sapiens
QNLGSCRALCAVAHTSDVTG

SEQ ID NO: 1320 - protein, 20 aa, Homo sapiens
SPTFRSSYRRVFHTLRGKGQ

SEQ ID NO: 1321 - protein, 20 aa, Homo sapiens
DELFRDRYNHTFCFEKFPME

SEQ ID NO: 1322 - protein, 20 aa, Homo sapiens
LRAVRGSVSTERQEKAKIKR

SEQ ID NO: 1323 - protein, 19 aa, Homo sapiens
RSDVAKALHNLLRFLASDK

SEQ ID NO: 1324 - protein, 19 aa, Homo sapiens
NASLTLETPLTSKRNSTAK

SEQ ID NO: 1325 - protein, 16 aa, Homo sapiens
FQYLVPSETVSLLTVG

SEQ ID NO: 1326 - protein, 18 aa, Homo sapiens
CLAERAACSVVRPLARSH

SEQ ID NO: 1327 - protein, 15 aa, Homo sapiens
HLYVRICQVVWRHAH

SEQ ID NO: 1328 - protein, 17 aa, Homo sapiens
EIQRALWLLLCGCFQSK

SEQ ID NO: 1329 - protein, 17 aa, Homo sapiens
ATAESRRVAGRTYSAAR

SEQ ID NO: 1330 - protein, 19 aa, Homo sapiens
RLDDEQGRRQCVLVFPQPE

SEQ ID NO: 1331 - protein, 20 aa, Homo sapiens
RLHAMRLDSHAKALERAKKR

SEQ ID NO: 1332 - protein, 14 aa, Homo sapiens
DASFRRNLRQLITC

SEQ ID NO: 1333 - protein, 17 aa, Homo sapiens
NVSQDNGTGHNATFSEP

SEQ ID NO: 1334 - protein, 17 aa, Homo sapiens
RSRHMPWRTYRGAKVAS

SEQ ID NO: 1335 - protein, 16 aa, Homo sapiens
VRLRSGAKALGKARRK

SEQ ID NO: 1336 - protein, 15 aa, Homo sapiens
LDDNFRKNFRSILRC

SEQ ID NO: 1337 - protein, 18 aa, Homo sapiens
QDHFLEIDKKNCCVFRDD

SEQ ID NO: 1338 - protein, 20 aa, Homo sapiens
ARIIWSLRQRQMDRHAKIKR

SEQ ID NO: 1339 - protein, 19 aa, Homo sapiens
CLQRKMTGEPDNNRSTSVE

SEQ ID NO: 1340 - protein, 18 aa, Homo sapiens
DPNKTRGAPEALMANSGE

SEQ ID NO: 1341 - protein, 20 aa, Homo sapiens
SNNHSKKGHCHQEPASLEKQ

SEQ ID NO: 1342 - protein, 20 aa, Homo sapiens
RQRQMDRHAKIKRAITFIMV

SEQ ID NO: 1343 - protein, 16 aa, Homo sapiens
SPSYLGPTSNNHSKKG

SEQ ID NO: 1344 - protein, 16 aa, Homo sapiens
AVRRSHGTQKSRKDQI

SEQ ID NO: 1345 - protein, 16 aa, Homo sapiens
LMHEEVIEDENQHRVC

SEQ ID NO: 1346 - protein, 16 aa, Homo sapiens
CFVSETTHRDLARLRG

SEQ ID NO: 1347 - protein, 20 aa, Homo sapiens
CSRTGRAREAYPLGAPEASG

SEQ ID NO: 1348 - protein, 20 aa, Homo sapiens
CRMYRQQKRHQGSLGPRPRT

SEQ ID NO: 1349 - protein, 16 aa, Homo sapiens
CFTQAVAPDSSSEMGD

SEQ ID NO: 1350 - protein, 20 aa, Homo sapiens
ASGRRDPRAPSAPVGKEGSC

SEQ ID NO: 1351 - protein, 16 aa, Homo sapiens
SAWGEGQVEPLPPTQQ

SEQ ID NO: 1352 - protein, 20 aa, Homo sapiens
KSPFYRCQNTTSVEKGNSAV

SEQ ID NO: 1353 - protein, 17 aa, Homo sapiens
RNLYAMHRRLQRHPRSC

SEQ ID NO: 1354 - protein, 19 aa, Homo sapiens
CAEPRADGREASPQPLEEL

SEQ ID NO: 1355 - protein, 20 aa, Homo sapiens
KDVKEKNRTSEEAEDLRALR

SEQ ID NO: 1356 - protein, 16 aa, Homo sapiens
AQAAGRLRRRRSATTF

SEQ ID NO: 1357 - protein, 20 aa, Homo sapiens
CVGVTRPLLHAARVSVARAR

SEQ ID NO: 1358 - protein, 16 aa, Homo sapiens
CNTLSGLALHRARWRR

SEQ ID NO: 1359 - protein, 16 aa, Homo sapiens
ASGPDSRRRWGAHGPR

SEQ ID NO: 1360 - protein, 17 aa, Homo sapiens
SGSARRARAHDVEMVGQ

SEQ ID NO: 1361 - protein, 16 aa, Homo sapiens
IALALLARRWRGDVGC

SEQ ID NO: 1362 - protein, 18 aa, Homo sapiens
CETRQWLPPGESPAISSV

SEQ ID NO: 1363 - protein, 18 aa, Homo sapiens
GPSLGSGRGGPGARRRGE

SEQ ID NO: 1364 - protein, 16 aa, Homo sapiens
NETSSRKEKWDLQALR

SEQ ID NO: 1365 - protein, 20 aa, Homo sapiens
ERSAEARGNLTRPPGSGEDC

SEQ ID NO: 1366 - protein, 18 aa, Homo sapiens
SRSYRRRESKRKKSFLLC

SEQ ID NO: 1367 - protein, 16 aa, Homo sapiens
CRAKATASQSSAQWGR

SEQ ID NO: 1368 - protein, 17 aa, Homo sapiens
KFCQVANAVSSCSNDGQ

SEQ ID NO: 1369 - protein, 18 aa, Homo sapiens
RLSDFRRRRSFRRIAGAE

SEQ ID NO: 1370 - protein, 17 aa, Homo sapiens
EREVSKNPDLQAIRIAS

SEQ ID NO: 1371 - protein, 20 aa, Homo sapiens
DSQRTSSAMSGHSRSFISRE

SEQ ID NO: 1372 - protein, 18 aa, Homo sapiens
RTLRISETSDSSQGQDSE

SEQ ID NO: 1373 - protein, 16 aa, Homo sapiens
ILMKAYQRFRQKSKAS

SEQ ID NO: 1374 - protein, 16 aa, Homo sapiens
ASDKEWIRFDQSNVLC

SEQ ID NO: 1375 - protein, 16 aa, Homo sapiens
TKPIFHSTKITSKHVK

SEQ ID NO: 1376 - protein, 16 aa, Homo sapiens
CFYNTEDIKDWEDRFY

SEQ ID NO: 1377 - protein, 18 aa, Homo sapiens
RVKFKSQQHRQGRSHHLE

SEQ ID NO: 1378 - protein, 20 aa, Homo sapiens
QGTNRSSKGRSLIGKVDGTS

SEQ ID NO: 1379 - protein, 18 aa, Homo sapiens
QRYWVIVNPMGHSRKKAN

SEQ ID NO: 1380 - protein, 18 aa, Homo sapiens
SHDFRDHAKNALLCRSVR

SEQ ID NO: 1381 - protein, 16 aa, Homo sapiens
VSLTSKKHSRKSSSYS

SEQ ID NO: 1382 - protein, 18 aa, Homo sapiens
ENDTNNLAKPTLPIKTFR

SEQ ID NO: 1383 - protein, 17 aa, Homo sapiens
CPEESASHLHVKNATMG

SEQ ID NO: 1384 - protein, 19 aa, Homo sapiens
QPDITTCHDVHNTCESSSP

SEQ ID NO: 1385 - protein, 14 aa, Homo sapiens
MSKTRNHSTAYLTK

SEQ ID NO: 1386 - protein, 15 aa, Homo sapiens
RDHKSGTPANVFLMH

SEQ ID NO: 1387 - protein, 19 aa, Homo sapiens
RSLRQGLRVEKRLKTKAVR

SEQ ID NO: 1388 - protein, 18 aa, Homo sapiens
RSHGASCATQRILALANR

SEQ ID NO: 1389 - protein, 15 aa, Homo sapiens
FEGKTNESSLSAKSE

SEQ ID NO: 1390 - protein, 17 aa, Homo sapiens
RNCMLTTICCGKNPLGD

SEQ ID NO: 1391 - protein, 19 aa, Homo sapiens
CGIDYYTLKPEVNNESFVI

SEQ ID NO: 1392 - protein, 19 aa, Homo sapiens
CWVPYASVAFYIFTHQGSN

SEQ ID NO: 1393 - protein, 16 aa, Homo sapiens
VLGGFTSTLYTSLHGY

SEQ ID NO: 1394 - protein, 16 aa, Homo sapiens
ATSSLLRRWPYGSDGC

SEQ ID NO: 1395 - protein, 16 aa, Homo sapiens
CTLDYSKGDRNFTSFL

SEQ ID NO: 1396 - protein, 16 aa, Homo sapiens
MEQKLGKSGHLQVNTT

SEQ ID NO: 1397 - protein, 16 aa, Homo sapiens
MVCRGIWQCLSPQKRE

SEQ ID NO: 1398 - protein, 17 aa, Homo sapiens
CLQELSREQTGDLGTEQ

SEQ ID NO: 1399 - protein, 18 aa, Homo sapiens
CPRFLRMLTSRNGSLFRN

SEQ ID NO: 1400 - protein, 16 aa, Homo sapiens
CGVNVNDSSNEKRHSY

SEQ ID NO: 1401 - protein, 17 aa, Homo sapiens
KDAVLFSSDDVTYCDAH

SEQ ID NO: 1402 - protein, 16 aa, Homo sapiens
MRKLRTQETRGNEVSH

SEQ ID NO: 1403 - protein, 16 aa, Homo sapiens
EEPGRNASQNGTLSEG

SEQ ID NO: 1404 - protein, 15 aa, Homo sapiens
CLSWMDNAAEEPVDY

SEQ ID NO: 1405 - protein, 19 aa, Homo sapiens
EDFQPENLESGGVFRNGTC

SEQ ID NO: 1406 - protein, 14 aa, Homo sapiens
LSVDAVNMFTSIYC

SEQ ID NO: 1407 - protein, 15 aa, Homo sapiens
RAYSVEDFQPENLES

SEQ ID NO: 1408 - protein, 17 aa, Homo sapiens
RSNQWGRSSCTINWPGE

SEQ ID NO: 1409 - protein, 18 aa, Homo sapiens
KVKSSGIRVGSSKRKKSE

SEQ ID NO: 1410 - protein, 16 aa, Homo sapiens
CLVKVSGTDDGERSDS

SEQ ID NO: 1411 - protein, 16 aa, Homo sapiens
KQDKSRLNETTETQRT

SEQ ID NO: 1412 - protein, 17 aa, Homo sapiens
DMADEPLNGSHTWLSIP

SEQ ID NO: 1413 - protein, 16 aa, Homo sapiens
KVRSAGRRVWAPSCQR

SEQ ID NO: 1414 - protein, 16 aa, Homo sapiens
REGGKGKEMNGRVSQI

SEQ ID NO: 1415 - protein, 15 aa, Homo sapiens
TTSEPENASSAWPPD

SEQ ID NO: 1416 - protein, 15 aa, Homo sapiens
QPGTSGQERPPSRVA

SEQ ID NO: 1417 - protein, 16 aa, Homo sapiens
IFADTRPARGGQAVAC

SEQ ID NO: 1418 - protein, 16 aa, Homo sapiens
CLLEGAGGAEEEPLDY

SEQ ID NO: 1419 - protein, 15 aa, Homo sapiens
KMRAVALRAGWQQRR

SEQ ID NO: 1420 - protein, 16 aa, Homo sapiens
CRAVLSVDGLNMFTSV

SEQ ID NO: 1421 - protein, 16 aa, Homo sapiens
CLVGLVGNALVIFVIL

SEQ ID NO: 1422 - protein, 16 aa, Homo sapiens
SLPLLVFADVQEGGTC

SEQ ID NO: 1423 - protein, 16 aa, Homo sapiens
CLRKGSGAKDADATEP

SEQ ID NO: 1424 - protein, 17 aa, Homo sapiens
RIRQQQEATPPAHRAAA

SEQ ID NO: 1425 - protein, 16 aa, Homo sapiens
RVAKLASAAAWVLSLC

SEQ ID NO: 1426 - protein, 16 aa, Homo sapiens
CMIEWPEHPNKIYEKV

SEQ ID NO: 1427 - protein, 20 aa, Homo sapiens
CPFISAGDYEGLEMKSTRYL

SEQ ID NO: 1428 - protein, 18 aa, Homo sapiens
KVSRLETTISTVVGAHEE

SEQ ID NO: 1429 - protein, 19 aa, Homo sapiens
EPEDGPKATPSSLDLTSNC

SEQ ID NO: 1430 - protein, 16 aa, Homo sapiens
EDEEKNESGLTEYRLV

SEQ ID NO: 1431 - protein, 20 aa, Homo sapiens
AVANRSKKSRALFLSAAVFC

SEQ ID NO: 1432 - protein, 18 aa, Homo sapiens
SINKSSPLQKQLPAFISE

SEQ ID NO: 1433 - protein, 19 aa, Homo sapiens
DPRSFLLRNPNDKYEPFWE

SEQ ID NO: 1434 - protein, 16 aa, Homo sapiens
PSDPKENSKTWKNDST

SEQ ID NO: 1435 - protein, 17 aa, Homo sapiens
CFNSTVSSRKQVTKMLA

SEQ ID NO: 1436 - protein, 16 aa, Homo sapiens
RAAFRKLCNCKQKPTE

SEQ ID NO: 1437 - protein, 16 aa, Homo sapiens
KPANYSVALNYSVIKE

SEQ ID NO: 1438 - protein, 17 aa, Homo sapiens
KESDHFSTELDDITVTD

SEQ ID NO: 1439 - protein, 16 aa, Homo sapiens
EIQKNKPRNDDIFKII

SEQ ID NO: 1440 - protein, 18 aa, Homo sapiens
SYRPSDNVSSSTKKPAPC

SEQ ID NO: 1441 - protein, 16 aa, Homo sapiens
LNSSTEDGIKRIQDDC

SEQ ID NO: 1442 - protein, 16 aa, Homo sapiens
CSQKPSDKHLDAIPIL

SEQ ID NO: 1443 - protein, 16 aa, Homo sapiens
DRYQSVIYPFLSQRRN

SEQ ID NO: 1444 - protein, 18 aa, Homo sapiens
RKHLLKTNSYGKNRITRD

SEQ ID NO: 1445 - protein, 16 aa, Homo sapiens
RVPITWLQGKRESMSC

SEQ ID NO: 1446 - protein, 19 aa, Homo sapiens
CHDTTRPEEFDHYVHFSSA

SEQ ID NO: 1447 - protein, 16 aa, Homo sapiens
YLLTGDKYRRQLRQLC

SEQ ID NO: 1448 - protein, 15 aa, Homo sapiens
HPLRALRWGRPRLAG

SEQ ID NO: 1449 - protein, 17 aa, Homo sapiens
HITRTIYYLARLLEADC

SEQ ID NO: 1450 - protein, 20 aa, Homo sapiens
REAEALGEGNGPPRDVRNEE

SEQ ID NO: 1451 - protein, 16 aa, Homo sapiens
NVRGKTASRQSKGAEQ

SEQ ID NO: 1452 - protein, 19 aa, Homo sapiens
QNMKEKFNKEDTDSMSRRQ

SEQ ID NO: 1453 - protein, 20 aa, Homo sapiens
RQTFYSNNRSPTNSTGMWKD

SEQ ID NO: 1454 - protein, 17 aa, Homo sapiens
NATTPWLGRDEELAKVE

SEQ ID NO: 1455 - protein, 20 aa, Homo sapiens
TRGLPSRVSSINTISRAKIR

SEQ ID NO: 1456 - protein, 17 aa, Homo sapiens
QPRMRRRLSDGSLSSRH

SEQ ID NO: 1457 - protein, 17 aa, Homo sapiens
ESPRDLELADGEGTAET

SEQ ID NO: 1458 - protein, 20 aa, Homo sapiens
SNSSQERPLDTRDPLLARAE

SEQ ID NO: 1459 - protein, 19 aa, Homo sapiens
RHGSGAHWNRPVLVAWAFS

SEQ ID NO: 1460 - protein, 20 aa, Homo sapiens
CQVLIFREIHASLVPGPSER

SEQ ID NO: 1461 - protein, 15 aa, Homo sapiens
RGRTPPSLGPQDESC

SEQ ID NO: 1462 - protein, 16 aa, Homo sapiens
KNEDGSVFSQTEHNIV

SEQ ID NO: 1463 - protein, 16 aa, Homo sapiens
IKYKELRTPTNAIIIN

SEQ ID NO: 1464 - protein, 16 aa, Homo sapiens
RKNDRSFVSYTMTVIA

SEQ ID NO: 1465 - protein, 17 aa, Homo sapiens
CTESLNRDWSDQIDVTK

SEQ ID NO: 1466 - protein, 16 aa, Homo sapiens
VANKKFRRAMLAMFKC

SEQ ID NO: 1467 - protein, 20 aa, Homo sapiens
CGPAGRTSSRSQSLRSTDAR

SEQ ID NO: 1468 - protein, 16 aa, Homo sapiens
EENRDKWEEAQLAGPN

SEQ ID NO: 1469 - protein, 16 aa, Homo sapiens
CRVVDRQEEGNGDSGG

SEQ ID NO: 1470 - protein, 16 aa, Homo sapiens
KRDKAPKSSFVGDGDI

SEQ ID NO: 1471 - protein, 16 aa, Homo sapiens
RKLQHAAEKDKEVLGP

SEQ ID NO: 1472 - protein, 19 aa, Homo sapiens
CLRPSPEEAVAQAESEVGR

SEQ ID NO: 1473 - protein, 16 aa, Homo sapiens
GSSNDLFTTEMRYGEE

SEQ ID NO: 1474 - protein, 20 aa, Homo sapiens
MARDGISDKSKKQRAGSERC

SEQ ID NO: 1475 - protein, 17 aa, Homo sapiens
EDAPRARPEGTPRRAAK

SEQ ID NO: 1476 - protein, 20 aa, Homo sapiens
RSRTMPRTVPGSTMKMGSLE

SEQ ID NO: 1477 - protein, 19 aa, Homo sapiens
KREKRWSVSSGGAAERSVC

SEQ ID NO: 1478 - protein, 16 aa, Homo sapiens
RRVFPTNFPGLQKKGE

SEQ ID NO: 1479 - protein, 16 aa, Homo sapiens
CNLTREAKRPPKEEFG

SEQ ID NO: 1480 - protein, 20 aa, Homo sapiens
KLKHRAGQMSEPHSGLTLKC

SEQ ID NO: 1481 - protein, 19 aa, Homo sapiens
CTDDNLRGADMDIVHPQER

SEQ ID NO: 1482 - protein, 17 aa, Homo sapiens
SRSETGSTISMSSLERR

SEQ ID NO: 1483 - protein, 16 aa, Homo sapiens
NDSSQEEHQDFLQFSK

SEQ ID NO: 1484 - protein, 16 aa, Homo sapiens
KATKAYNQQAKRMTWG

SEQ ID NO: 1485 - protein, 16 aa, Homo sapiens
KTLLHAGGFQKHRSLK

SEQ ID NO: 1486 - protein, 17 aa, Homo sapiens
SLKFRKNFWKLVKDIGC

SEQ ID NO: 1487 - protein, 16 aa, Homo sapiens
KSSEDNSKTFSASHNV

SEQ ID NO: 1488 - protein, 19 aa, Homo sapiens
ERHRSVMAVQLHSRLPRGR

SEQ ID NO: 1489 - protein, 19 aa, Homo sapiens
RRRVQRMAEHVSCHPRYRE

SEQ ID NO: 1490 - protein, 18 aa, Homo sapiens
NAAVYSCRDAEMRRTFRR

SEQ ID NO: 1491 - protein, 20 aa, Homo sapiens
RQSTRESVHYTSSAQGGAST

SEQ ID NO: 1492 - protein, 14 aa, Homo sapiens
YSQYQFWKNFQTLK

SEQ ID NO: 1493 - protein, 20 aa, Homo sapiens
QQEAPERASSVYTRSTGEQE

SEQ ID NO: 1494 - protein, 19 aa, Homo sapiens
RSQKEGLHYTCSSHFPYSQ

SEQ ID NO: 1495 - protein, 20 aa, Homo sapiens
MDYQVSSPIYDINYYTSEPC

SEQ ID NO: 1496 - protein, 20 aa, Homo sapiens
EDEYDVLIEGELESDEAEQC

SEQ ID NO: 1497 - protein, 20 aa, Homo sapiens
KGNFFSARRRVPCGIITSVL

SEQ ID NO: 1498 - protein, 20 aa, Homo sapiens
MRKTLRFREQRYSLFKLVFA

SEQ ID NO: 1499 - protein, 19 aa, Homo sapiens
RSNTPLQPRGQSAQGTSRE

SEQ ID NO: 1500 - protein, 20 aa, Homo sapiens
GPGNSARDVLRARAPREEQG

SEQ ID NO: 1501 - protein, 20 aa, Homo sapiens
DPGGPRRGNSTNRRVRLKNP

SEQ ID NO: 1502 - protein, 20 aa, Homo sapiens
LRQLSKEDLGFSGRAPAERC

SEQ ID NO: 1503 - protein, 20 aa, Homo sapiens [sequence omitted]

SEQ ID NO: 1504 - protein, 20 aa, Homo sapiens
CIQKSSTVTSDDNDNEYTTE

SEQ ID NO: 1505 - protein, 20 aa, Homo sapiens
CIQKSSTVTSDDNDNEYTTE

SEQ ID NO: 1506 - protein, 17 aa, Homo sapiens
TDVVETRLSQWLEEMPC

SEQ ID NO: 1507 - protein, 16 aa, Homo sapiens
KSLAGAAKHERKAAKT

SEQ ID NO: 1508 - protein, 18 aa, Homo sapiens
RKALKLTLSQKVFSPQTR

SEQ ID NO: 1509 - protein, 15 aa, Homo sapiens
HPAAFCYQVNGSCPR

SEQ ID NO: 1510 - protein, 16 aa, Homo sapiens
KAKSKYSPELLKYRLP

SEQ ID NO: 1511 - protein, 16 aa, Homo sapiens
KTGNWERKVIVSVRVA

SEQ ID NO: 1512 - protein, 18 aa, Homo sapiens
KSVHSFDYDWYNVSDQAD

SEQ ID NO: 1513 - protein, 16 aa, Homo sapiens
RVRNPTKDLTNPGMVP

SEQ ID NO: 1514 - protein, 18 aa, Homo sapiens
RYDSDDDLAWNIAPQGLQ

SEQ ID NO: 1515 - protein, 18 aa, Homo sapiens
PTLSFSHLKRPQQGAGNC

SEQ ID NO: 1516 - protein, 17 aa, Homo sapiens
GALGRAVLRSPGMTVAE

SEQ ID NO: 1517 - protein, 16 aa, Homo sapiens
MRVLNVDARRRWSTRC

SEQ ID NO: 1518 - protein, 19 aa, Homo sapiens
CPGYRDSWNPEDAKSTGQA

SEQ ID NO: 1519 - protein, 19 aa, Homo sapiens
CPANFLAAADDKLSGFQGD

SEQ ID NO: 1520 - protein, 16 aa, Homo sapiens
ASNGLALYRFSIRKQR

SEQ ID NO: 1521 - protein, 16 aa, Homo sapiens
CNRSSTRHHEQPETSN

SEQ ID NO: 1522 - protein, 16 aa, Homo sapiens
PNQIRRIMAAAKPKHD

SEQ ID NO: 1523 - protein, 16 aa, Homo sapiens
EKRLRVHAHSTTDSAR

SEQ ID NO: 1524 - protein, 20 aa, Homo sapiens
VQRPLLFASRRQSSARRTEK

SEQ ID NO: 1525 - protein, 20 aa, Homo sapiens
QSEAEPQSKSQSLSLESLEP

SEQ ID NO: 1526 - protein, 18 aa, Homo sapiens
NLTVCHPAWSAPRRRAMD

SEQ ID NO: 1527 - protein, 18 aa, Homo sapiens
RAVDPVAAGSGARRAKRK

SEQ ID NO: 1528 - protein, 17 aa, Homo sapiens
GRAPGRASGRVCAAARG

SEQ ID NO: 1529 - protein, 20 aa, Homo sapiens
ERESSDLLHMSEAAGALRPC

SEQ ID NO: 1530 - protein, 16 aa, Homo sapiens
DQLGDLEQGLSGEPQP

SEQ ID NO: 1531 - protein, 17 aa, Homo sapiens
EPSATPGAQMGVPPGSR

SEQ ID NO: 1532 - protein, 19 aa, Homo sapiens
KRPSDQLGDLEQGLSGEPQ

SEQ ID NO: 1533 - protein, 20 aa, Homo sapiens
KAPSPRSSASHKSLSLQSRC

SEQ ID NO: 1534 - protein, 20 aa, Homo sapiens
SELNETQEPFLNPTDYDDEE

SEQ ID NO: 1535 - protein, 16 aa, Homo sapiens
KWKPLQPVSQPRGPGQ

SEQ ID NO: 1536 - protein, 17 aa, Homo sapiens
TKSRMSAVAAEIKQIRA

SEQ ID NO: 1537 - protein, 18 aa, Homo sapiens
RQEDRLTRGRTSTESRKS

SEQ ID NO: 1538 - protein, 16 aa, Homo sapiens
AVTRPIKTAQANTRKR

SEQ ID NO: 1539 - protein, 18 aa, Homo sapiens
DSTNTVPDSAGSGNVTRC

SEQ ID NO: 1540 - protein, 16 aa, Homo sapiens
QQRNAEVKRRALWMVC

SEQ ID NO: 1541 - protein, 20 aa, Homo sapiens
KKFRKHLTEKFYSMRSSRKC

SEQ ID NO: 1542 - protein, 20 aa, Homo sapiens
DRYYSVLYPLERKISDAKSR

SEQ ID NO: 1543 - protein, 19 aa, Homo sapiens
DEEESEAKYIGSADFQAKE

SEQ ID NO: 1544 - protein, 19 aa, Homo sapiens
ETRNSKKRLLPPLGNTPEE

SEQ ID NO: 1545 - protein, 19 aa, Homo sapiens
ELIQTKVPKVGRVERKMSR

SEQ ID NO: 1546 - protein, 16 aa, Homo sapiens
KKQRKAQNFTSILIAN

SEQ ID NO: 1547 - protein, 17 aa, Homo sapiens
FRNLSLPTDLYTHQVAC

SEQ ID NO: 1548 - protein, 16 aa, Homo sapiens
CVENWPSKKDRLLFTT

SEQ ID NO: 1549 - protein, 18 aa, Homo sapiens
CLRRRNAKVDKKKENEGR

SEQ ID NO: 1550 - protein, 18 aa, Homo sapiens
DEPFQNVTLDAYKDKYVC

SEQ ID NO: 1551 - protein, 18 aa, Homo sapiens
CYFKIYIRLKRRNNMMDK

SEQ ID NO: 1552 - protein, 16 aa, Homo sapiens
CDFRSRDDDYETIAMS

SEQ ID NO: 1553 - protein, 18 aa, Homo sapiens
ENDDCHLPLAMIFTLALA

SEQ ID NO: 1554 - protein, 18 aa, Homo sapiens
SNFSEKNAQLLAFENDDC

SEQ ID NO: 1555 - protein, 17 aa, Homo sapiens
CESLSLASNISDNGYRE

SEQ ID NO: 1556 - protein, 18 aa, Homo sapiens
CQEILNEEKKSKVHYHVA

SEQ ID NO: 1557 - protein, 16 aa, Homo sapiens
NHSEDGAPALLTTAPP

SEQ ID NO: 1558 - protein, 16 aa, Homo sapiens
GGAPPRYATLEHPFHC

SEQ ID NO: 1559 - protein, 16 aa, Homo sapiens
CEPARPDGSMFFSQEE

SEQ ID NO: 1560 - protein, 16 aa, Homo sapiens
AAREAGAAVRRPLGPE

SEQ ID NO: 1561 - protein, 16 aa, Homo sapiens
LRYRRPPREKIGRRRA

SEQ ID NO: 1562 - protein, 16 aa, Homo sapiens
PRELAAGQSFHGCLYR

SEQ ID NO: 1563 - protein, 19 aa, Homo sapiens
CKTVRLSDVRVRPVNTYAR

SEQ ID NO: 1564 - protein, 16 aa, Homo sapiens
EDFWKGEDLSNYSYSS

SEQ ID NO: 1565 - protein, 16 aa, Homo sapiens
PPFLLDAAPCEPESLE

SEQ ID NO: 1566 - protein, 15 aa, Homo sapiens
RRTVYSSNVSPACYE

SEQ ID NO: 1567 - protein, 16 aa, Homo sapiens
SKDSLPKDSRPSFVGS

SEQ ID NO: 1568 - protein, 20 aa, Homo sapiens
PKPFLYVVGRKKMMDAQYKC

SEQ ID NO: 1569 - protein, 17 aa, Homo sapiens
VEVVPNGELVRRDPVSC

SEQ ID NO: 1570 - protein, 16 aa, Homo sapiens
KIQWNQRWGRRPSNRS

SEQ ID NO: 1571 - protein, 19 aa, Homo sapiens
CHQEPRNEPANNQGEESAE

SEQ ID NO: 1572 - protein, 18 aa, Homo sapiens
TKSFRLRSRTLPRSKIIC

SEQ ID NO: 1573 - protein, 18 aa, Homo sapiens
STFVFNQKYNTQGSDVCE

SEQ ID NO: 1574 - protein, 15 aa, Homo sapiens
TAANLGKMNRSCQSE

SEQ ID NO: 1575 - protein, 20 aa, Homo sapiens
RYSENISRQTSETADNDNAS

SEQ ID NO: 1576 - protein, 16 aa, Homo sapiens
CPLAPPPELHPPAPAP

SEQ ID NO: 1577 - protein, 15 aa, Homo sapiens
CAIVERERGWPDFLR

SEQ ID NO: 1578 - protein, 15 aa, Homo sapiens
CTNEVQNIKFNSSGQ

SEQ ID NO: 1579 - protein, 16 aa, Homo sapiens
CEVPLVRTDNPKSWYE

SEQ ID NO: 1580 - protein, 16 aa, Homo sapiens
CRADGTMRLGEPTSNE

SEQ ID NO: 1581 - protein, 16 aa, Homo sapiens
EAEISPELQKRLGRKK

SEQ ID NO: 1582 - protein, 16 aa, Homo sapiens
ANVTIGLPTKQPIPDC

SEQ ID NO: 1583 - protein, 16 aa, Homo sapiens
SNASDSGSTQLPAPLR

SEQ ID NO: 1584 - protein, 16 aa, Homo sapiens
CVLGYTELPADRAYVV

SEQ ID NO: 1585 - protein, 16 aa, Homo sapiens
LNTVRKNAVRVHNQSD

SEQ ID NO: 1586 - protein, 17 aa, Homo sapiens
KVPERIRRRIQPSTVYC

SEQ ID NO: 1587 - protein, 16 aa, Homo sapiens
DSLDLRQLTRAGLRRL

SEQ ID NO: 1588 - protein, 18 aa, Homo sapiens
EDADAENSSFYYYDYLDE

SEQ ID NO: 1589 - protein, 18 aa, Homo sapiens
DKYLEIVHAQPYHRLRTR

SEQ ID NO: 1590 - protein, 16 aa, Homo sapiens
CVLVRLRPAGQGRALK

SEQ ID NO: 1591 - protein, 19 aa, Homo sapiens
DLGERQSENYPNKEDVGNK

SEQ ID NO: 1592 - protein, 20 aa, Homo sapiens
EKLTKRLKRHPEETGGFQEA

SEQ ID NO: 1593 - protein, 16 aa, Homo sapiens
KKEEKKEWRKTLEPWK

SEQ ID NO: 1594 - protein, 20 aa, Homo sapiens
DPLHRTIETFAKEEPKEDID

SEQ ID NO: 1595 - protein, 20 aa, Homo sapiens
YEIEYVCRGEREVVGPKVRK

SEQ ID NO: 1596 - protein, 16 aa, Homo sapiens
SLWETVQKWREYRRQC

SEQ ID NO: 1597 - protein, 16 aa, Homo sapiens
LQKDNSSLPWRDLSEC

SEQ ID NO: 1598 - protein, 16 aa, Homo sapiens
CIVVSKLKANLMCKTD

SEQ ID NO: 1599 - protein, 20 aa, Homo sapiens
RWRLEHLHIQRDSSMKPLKC

SEQ ID NO: 1600 - protein, 16 aa, Homo sapiens
CQVDETEEPDVHLPQP

SEQ ID NO: 1601 - protein, 19 aa, Homo sapiens
REGLEAAGAAGASAASYSS

SEQ ID NO: 1602 - protein, 16 aa, Homo sapiens
KLPSARAKIRITSSPI

SEQ ID NO: 1603 - protein, 17 aa, Homo sapiens
ESKSSIKRVLAITTVLS

SEQ ID NO: 1604 - protein, 17 aa, Homo sapiens
QGTLEILYPDAHLSAED

SEQ ID NO: 1605 - protein, 16 aa, Homo sapiens
PKTPLKERISLPSRRS

SEQ ID NO: 1606 - protein, 19 aa, Homo sapiens
SVVQLRRQRPDFEWNEGLC

SEQ ID NO: 1607 - protein, 17 aa, Homo sapiens
PAVGWHDTSERFYTHGC

SEQ ID NO: 1608 - protein, 17 aa, Homo sapiens
AVQVGRQADRRAFTVPT

SEQ ID NO: 1609 - protein, 19 aa, Homo sapiens
EHEPAGEEALRQKRAVATK

SEQ ID NO: 1610 - protein, 16 aa, Homo sapiens
ALRQKRAVATKSPTAE

SEQ ID NO: 1611 - protein, 20 aa, Homo sapiens
CEKEVLSSNVSWRYEEQQLE

SEQ ID NO: 1612 - protein, 20 aa, Homo sapiens
RLANNTGGWDSSGCYVEEGD

SEQ ID NO: 1613 - protein, 16 aa, Homo sapiens
CKQEKSSLFQISKSIG

SEQ ID NO: 1614 - protein, 20 aa, Homo sapiens
CTAFQRREGGVPGTRPGSPG

SEQ ID NO: 1615 - protein, 17 aa, Homo sapiens
APGTRASRRCDRAGRWE

SEQ ID NO: 1616 - protein, 17 aa, Homo sapiens
CPAERVANNRGDFRWPR

SEQ ID NO: 1617 - protein, 19 aa, Homo sapiens
QNPPPEPEPPADQQLRFRC

SEQ ID NO: 1618 - protein, 16 aa, Homo sapiens
VPLGGGAPGTRASRRC

SEQ ID NO: 1619 - protein, 15 aa, Homo sapiens
PAARVHRPSRCRYRD

SEQ ID NO: 1620 - protein, 19 aa, Homo sapiens
TLARPDATQSQRRRKTVRL

SEQ ID NO: 1621 - protein, 17 aa, Homo sapiens
RSKLVAASVPARDRVRG

SEQ ID NO: 1622 - protein, 16 aa, Homo sapiens
AQSERSAVTTDATRPD

SEQ ID NO: 1623 - protein, 19 aa, Homo sapiens
CSGKSTESSIGSGKTSGSR

SEQ ID NO: 1624 - protein, 16 aa, Homo sapiens
ENHQPHHYTRRRIPQD

SEQ ID NO: 1625 - protein, 16 aa, Homo sapiens
ESVTTSTQTEPPPAKC

SEQ ID NO: 1626 - protein, 16 aa, Homo sapiens
SSASLNREGLLNNARD

SEQ ID NO: 1627 - protein, 17 aa, Homo sapiens
DRYIKINRSIQQRKAIT

SEQ ID NO: 1628 - protein, 17 aa, Homo sapiens
CFHYRDKHNAKGEAIFN

SEQ ID NO: 1629 - protein, 16 aa, Homo sapiens
RISKRRSKFPNSGKYA

SEQ ID NO: 1630 - protein, 20 aa, Homo sapiens
CQLLFRRFQGEPSRSESTSE

SEQ ID NO: 1631 - protein, 16 aa, Homo sapiens
RLQEIILTFEKINKTR

SEQ ID NO: 1632 - protein, 16 aa, Homo sapiens
KGKSRAAENASLGPTN

SEQ ID NO: 1633 - protein, 16 aa, Homo sapiens
LLFGTIMDHKIRDALR

SEQ ID NO: 1634 - protein, 18 aa, Homo sapiens
RPSIGSSKSQDVVIIMRI

SEQ ID NO: 1635 - protein, 17 aa, Homo sapiens
KLPNNELHGQESHNSGN

SEQ ID NO: 1636 - protein, 19 aa, Homo sapiens
SGNRSDGPGKNTTLHNEFD

SEQ ID NO: 1637 - protein, 18 aa, Homo sapiens
RQFISQSSRKRKHNQSIR

SEQ ID NO: 1638 - protein, 18 aa, Homo sapiens
SHLDRLLDESAQKILYYC

SEQ ID NO: 1639 - protein, 19 aa, Homo sapiens
CRSFSRRLFKKSNIRTRSE

SEQ ID NO: 1640 - protein, 19 aa, Homo sapiens
ESIRSLQSVRRSEVRIYYD

SEQ ID NO: 1641 - protein, 18 aa, Homo sapiens
CRKELSNLTEEEGGEGGV

SEQ ID NO: 1642 - protein, 19 aa, Homo sapiens
EEDAQRTGRKNSSTSTSSS

SEQ ID NO: 1643 - protein, 19 aa, Homo sapiens
CFGDRYYREPFVQRQRTSR

SEQ ID NO: 1644 - protein, 19 aa, Homo sapiens
HSSSTGDTGFSCSQDSGNL

SEQ ID NO: 1645 - protein, 20 aa, Homo sapiens
CQKLQKIDLRHNEIYEIKVD

SEQ ID NO: 1646 - protein, 16 aa, Homo sapiens
NKGDNSSMDDLHKKDA

SEQ ID NO: 1647 - protein, 16 aa, Homo sapiens
QDERDLEDFLLDFEED

SEQ ID NO: 1648 - protein, 16 aa, Homo sapiens
ERGFSVKYSAKFETKA

SEQ ID NO: 1649 - protein, 20 aa, Homo sapiens
RSKHPSLMSINSDDVEKQSC

SEQ ID NO: 1650 - protein, 16 aa, Homo sapiens
DAQKESTGVTTLRQRR

SEQ ID NO: 1651 - protein, 17 aa, Homo sapiens
CKKINQLISETEAVVTN

SEQ ID NO: 1652 - protein, 16 aa, Homo sapiens
ADDQTLLEQMMDQDDG

SEQ ID NO: 1653 - protein, 16 aa, Homo sapiens
KYNQSISLRRPRLASQ

SEQ ID NO: 1654 - protein, 15 aa, Homo sapiens
KRYFAKFEEKFFQTC

SEQ ID NO: 1655 - protein, 16 aa, Homo sapiens
DGDRQKAMKRLRVPPL

SEQ ID NO: 1656 - protein, 18 aa, Homo sapiens
RVRSGRVRSYSTRDFQDC

SEQ ID NO: 1657 - protein, 20 aa, Homo sapiens
CNNSVPGKEHPFDITVMIRE

SEQ ID NO: 1658 - protein, 19 aa, Homo sapiens
APSKPGLPKPQATVPRKVD

SEQ ID NO: 1659 - protein, 19 aa, Homo sapiens
AASKPKSTPAVIQGPSGKD

SEQ ID NO: 1660 - protein, 20 aa, Homo sapiens
KRSELNKTLQTLSETYFIMC

SEQ ID NO: 1661 - protein, 20 aa, Homo sapiens
GNASTERNGVSFSVQNGDVC

SEQ ID NO: 1662 - protein, 19 aa, Homo sapiens
CRIKKKKQLGAQRKTSIQD

SEQ ID NO: 1663 - protein, 16 aa, Homo sapiens
DFTGKQHMFNEKEDSC

SEQ ID NO: 1664 - protein, 17 aa, Homo sapiens
PNVNPASAGNQTQKTQD

SEQ ID NO: 1665 - protein, 18 aa, Homo sapiens
RVKSPPEAGTQLPKIIFS

SEQ ID NO: 1666 - protein, 19 aa, Homo sapiens
KDGYMVVNVSSLSLNEPED

SEQ ID NO: 1667 - protein, 20 aa, Homo sapiens
RSTVDSKAMGEKSFSVHNNG

SEQ ID NO: 1668 - protein, 16 aa, Homo sapiens
CQPLRARSLLTPRRTR

SEQ ID NO: 1669 - protein, 20 aa, Homo sapiens
GQKHELETADGEPEPASRVC

SEQ ID NO: 1670 - protein, 17 aa, Homo sapiens
KKTFIQGGQVSLVRHKD

SEQ ID NO: 1671 - protein, 17 aa, Homo sapiens
CGEHHPMKRLPPKPQSP

SEQ ID NO: 1672 - protein, 19 aa, Homo sapiens
STSTPGSSTPSRLELLSEE

SEQ ID NO: 1673 - protein, 16 aa, Homo sapiens
METSSPRPPRPSSNPG

SEQ ID NO: 1674 - protein, 17 aa, Homo sapiens
CSQVPSTSTPGSSTPSR

SEQ ID NO: 1675 - protein, 16 aa, Homo sapiens
DPNGNESSATYFILIG

SEQ ID NO: 1676 - protein, 16 aa, Homo sapiens
RHATVLTLPRVTKIGV

SEQ ID NO: 1677 - protein, 16 aa, Homo sapiens
ILKTVLGLTREAQAKA

SEQ ID NO: 1678 - protein, 17 aa, Homo sapiens
HRFSKRRDSPLPVILAN

SEQ ID NO: 1679 - protein, 19 aa, Homo sapiens
KEIRQRILRLFHVATHASE

SEQ ID NO: 1680 - protein, 17 aa, Homo sapiens
GEDIEISDTESFSNDPC

SEQ ID NO: 1681 - protein, 17 aa, Homo sapiens
SSKQIKTISGKTPQQYE

SEQ ID NO: 1682 - protein, 17 aa, Homo sapiens
AATQNRRFQFTQNQKKE

SEQ ID NO: 1683 - protein, 17 aa, Homo sapiens
CKDPIEDINSPEHIQRR

SEQ ID NO: 1684 - protein, 19 aa, Homo sapiens
CVLSRKIQEEYYRLFKNVP

SEQ ID NO: 1685 - protein, 19 aa, Homo sapiens
CIAANINKTLTKIRSIKEP

SEQ ID NO: 1686 - protein, 19 aa, Homo sapiens
KLSVNHRRTHLTKLMHTVE

SEQ ID NO: 1687 - protein, 20 aa, Homo sapiens
EKITFTLSHRKVTDRYRSLC

SEQ ID NO: 1688 - protein, 16 aa, Homo sapiens
SSSLLGYKNNTISAKD

SEQ ID NO: 1689 - protein, 18 aa, Homo sapiens
CSSYELQQQSMKRSNRRK

SEQ ID NO: 1690 - protein, 20 aa, Homo sapiens
KPSSEQMDQDHSSSDSWNNN

SEQ ID NO: 1691 - protein, 16 aa, Homo sapiens
DLERKADKLQAQKSVD

SEQ ID NO: 1692 - protein, 16 aa, Homo sapiens
KEATLAKRFALKTRSQ

SEQ ID NO: 1693 - protein, 19 aa, Homo sapiens
PPTCRPRRMSVCYRPPGNE

SEQ ID NO: 1694 - protein, 20 aa, Homo sapiens
CLAVTRPFLAPRLRSPALAR

SEQ ID NO: 1695 - protein, 16 aa, Homo sapiens
RGARWGSGRHGARVGR

SEQ ID NO: 1696 - protein, 16 aa, Homo sapiens
TAGDLLPRAGPRFLTR

SEQ ID NO: 1697 - protein, 18 aa, Homo sapiens
EGSGEARGGGRSREGTME

SEQ ID NO: 1698 - protein, 17 aa, Homo sapiens
RTTPQLKVVGQGRGNGD

SEQ ID NO: 1699 - protein, 20 aa, Homo sapiens
RSAPTALSRRLRARTHLPGC

SEQ ID NO: 1700 - protein, 17 aa, Homo sapiens
VRGSHGEPDASLMPRSC

SEQ ID NO: 1701 - protein, 19 aa, Homo sapiens
RKEDSVLMEATSGGPTSFR

SEQ ID NO: 1702 - protein, 19 aa, Homo sapiens
DQNKADIGGMLPGLTVRSV

SEQ ID NO: 1703 - protein, 19 aa, Homo sapiens
PAGWPDQSLAESDSEDPSG

SEQ ID NO: 1704 - protein, 16 aa, Homo sapiens
ETNHSLGKDDLRPSSP

SEQ ID NO: 1705 - protein, 18 aa, Homo sapiens
SLVHELSGRRWQLGRRLC

SEQ ID NO: 1706 - protein, 16 aa, Homo sapiens
LLFGWGETYSEGSEEC

SEQ ID NO: 1707 - protein, 16 aa, Homo sapiens
FRVGSRKTNSVSPISE

SEQ ID NO: 1708 - protein, 18 aa, Homo sapiens
RHATVTFQPEGDTWREQK

SEQ ID NO: 1709 - protein, 16 aa, Homo sapiens
GITRPFSRPAVASQRR

SEQ ID NO: 1710 - protein, 20 aa, Homo sapiens
CHVYHGQEAAQQRPRDSEVE

SEQ ID NO: 1711 - protein, 17 aa, Homo sapiens
RNPPAMSPAGQLSRTTE

SEQ ID NO: 1712 - protein, 17 aa, Homo sapiens
RRLQPRLSTRPRRVSLC

SEQ ID NO: 1713 - protein, 19 aa, Homo sapiens
RYLSVVSPLSTLRVPTLRC

SEQ ID NO: 1714 - protein, 20 aa, Homo sapiens
SSILDTIFHKVLSSGCDYSE

SEQ ID NO: 1715 - protein, 20 aa, Homo sapiens
VEILRTLFRSRSKRRHRTVK

SEQ ID NO: 1716 - protein, 19 aa, Homo sapiens
QTLFRTQIIRSCEAKQQLE

SEQ ID NO: 1717 - protein, 20 aa, Homo sapiens
RLQAPSPASIPHSPGAFAYE

SEQ ID NO: 1718 - protein, 17 aa, Homo sapiens
RIEPYYSIYNSSPSQEE

SEQ ID NO: 1719 - protein, 16 aa, Homo sapiens
IMIAQTLRKNAQVRKC

SEQ ID NO: 1720 - protein, 19 aa, Homo sapiens
RNQNYNKLQHVQTRGYTKS

SEQ ID NO: 1721 - protein, 16 aa, Homo sapiens
SRLQLVSAINLSTAKD

SEQ ID NO: 1722 - protein, 19 aa, Homo sapiens
CKQKTRLRAMGKGNLEVNR

SEQ ID NO: 1723 - protein, 19 aa, Homo sapiens
NSAYMLSPKPQKKFVDQAC

SEQ ID NO: 1724 - protein, 16 aa, Homo sapiens
CKVQDSNRRKMLPTQF

SEQ ID NO: 1725 - protein, 16 aa, Homo sapiens
HAVSLTKLVRGRKPLS

SEQ ID NO: 1726 - protein, 16 aa, Homo sapiens
NVNVFSELSAPRRNED

SEQ ID NO: 1727 - protein, 16 aa, Homo sapiens
TKQRNPMDYPVEDAFC

SEQ ID NO: 1728 - protein, 16 aa, Homo sapiens
CKPQLVKKSYGVENRA

SEQ ID NO: 1729 - protein, 16 aa, Homo sapiens
RRAVPGHQAHGANLRH

SEQ ID NO: 1730 - protein, 20 aa, Homo sapiens
KEDKLELTPTTSLSTRVNRC

SEQ ID NO: 1731 - protein, 20 aa, Homo sapiens
KETLFMAGDTAPSEATSGEA

SEQ ID NO: 1732 - protein, 16 aa, Homo sapiens
CVVAWPEDSGGKTLLL

SEQ ID NO: 1733 - protein, 16 aa, Homo sapiens
RQRKSVNALNSPLHQE

SEQ ID NO: 1734 - protein, 20 aa, Homo sapiens
KFQDTHNNAHYYVFFEEQED

SEQ ID NO: 1735 - protein, 19 aa, Homo sapiens
CHVKIYITVRNPQYNPGDK

SEQ ID NO: 1736 - protein, 20 aa, Homo sapiens
CKRQAQAYRGQRVPPKNSTD

SEQ ID NO: 1737 - protein, 18 aa, Homo sapiens
SRSRFIRNTNESGEEVTT

SEQ ID NO: 1738 - protein, 20 aa, Homo sapiens
CQKEDSVYVCGPYFPRGWNN

SEQ ID NO: 1739 - protein, 20 aa, Homo sapiens
SGEEVTTFFDYDYGAPCHKF

SEQ ID NO: 1740 - protein, 20 aa, Homo sapiens
DFDDLNFTGMPPADEDYSPC

SEQ ID NO: 1741 - protein, 20 aa, Homo sapiens
CWGLSMNLSLPFFLFRQAYH

SEQ ID NO: 1742 - protein, 17 aa, Homo sapiens
RHRVTSYTSSSVNVSSN

SEQ ID NO: 1743 - protein, 20 aa, Homo sapiens
CMLETETLNKYVVIIAYALV

SEQ ID NO: 1744 - protein, 20 aa, Homo sapiens
EEPTNISTGRNASVGNAHRQ

SEQ ID NO: 1745 - protein, 16 aa, Homo sapiens
RRNPFTVYITHLSIAD

SEQ ID NO: 1746 - protein, 20 aa, Homo sapiens
YVMCIDREEESHSRNDCRAV

SEQ ID NO: 1747 - protein, 20 aa, Homo sapiens
SSTILVVKIRKNTWASHSSK

SEQ ID NO: 1748 - protein, 17 aa, Homo sapiens
TRAFKDEMQPRRQKDNC

SEQ ID NO: 1749 - protein, 19 aa, Homo sapiens
ERYLGVAFPVQYKLSRRPL

SEQ ID NO: 1750 - protein, 17 aa, Homo sapiens
QYLNTTEQVRSGNEITC

SEQ ID NO: 1751 - protein, 19 aa, Homo sapiens
EGTNEDRGVGQGEGMPSSD

SEQ ID NO: 1752 - protein, 20 aa, Homo sapiens
RGLQVLRNQGSSLLGRRGKD

SEQ ID NO: 1753 - protein, 17 aa, Homo sapiens
KQCLEEAQLENETIGCS

SEQ ID NO: 1754 - protein, 16 aa, Homo sapiens
KDLALFDSGESDQCSE

SEQ ID NO: 1755 - protein, 16 aa, Homo sapiens
LQKLRPPDIRKSDSSP

SEQ ID NO: 1756 - protein, 16 aa, Homo sapiens
NPKYRHPSGGSNGATC

SEQ ID NO: 1757 - protein, 17 aa, Homo sapiens
KVFSNFYSKAGNISKNC

SEQ ID NO: 1758 - protein, 16 aa, Homo sapiens
CGYSDPEDESKITFYI

SEQ ID NO: 1759 - protein, 16 aa, Homo sapiens
KRKWRSRCPTPSASRD

SEQ ID NO: 1760 - protein, 18 aa, Homo sapiens
CGSSFSRNGSEGALQFHR

SEQ ID NO: 1761 - protein, 17 aa, Homo sapiens
REPPWPALPPCDERRCS

SEQ ID NO: 1762 - protein, 19 aa, Homo sapiens
SPPSGPETAEAAALFSREC

SEQ ID NO: 1763 - protein, 20 aa, Homo sapiens
SSRRPLRGPAASGRERGHRQ

SEQ ID NO: 1764 - protein, 16 aa, Homo sapiens
RKSRPRGFHRSRDTAG

SEQ ID NO: 1765 - protein, 18 aa, Homo sapiens
NPLVTGYLGRGPGLKTVC

SEQ ID NO: 1766 - protein, 19 aa, Homo sapiens
GRYLGAAFPLGYQAFRRPC

SEQ ID NO: 1767 - protein, 16 aa, Homo sapiens
CLEAWDPASAGPARFS

SEQ ID NO: 1768 - protein, 17 aa, Homo sapiens
CLRALARSGLTHRRKLR

SEQ ID NO: 1769 - protein, 19 aa, Homo sapiens
NASNVASFLYPNLGGSWRK

SEQ ID NO: 1770 - protein, 16 aa, Homo sapiens
TVSLPLKAVEALASGA

SEQ ID NO: 1771 - protein, 19 aa, Homo sapiens
DHSNTSLGINTPVNGSPVC

SEQ ID NO: 1772 - protein, 17 aa, Homo sapiens
CSEAFPSRALERAFALY

SEQ ID NO: 1773 - protein, 18 aa, Homo sapiens
ERAGAVRAKVSRLVAAVV

SEQ ID NO: 1774 - protein, 20 aa, Homo sapiens
RRPGPSDPAAPHAELHRLGS

SEQ ID NO: 1775 - protein, 18 aa, Homo sapiens
GAPANASGCPGCGANASD

SEQ ID NO: 1776 - protein, 18 aa, Homo sapiens
DLFNHTLSECHVELSQST

SEQ ID NO: 1777 - protein, 20 aa, Homo sapiens
NVLTACRLRQPGQPKSRRHC

SEQ ID NO: 1778 - protein, 18 aa, Homo sapiens
KDQTKAGTCASSSSCSTQ

SEQ ID NO: 1779 - protein, 18 aa, Homo sapiens
KGDSQPAAAAPHPEPSLS

SEQ ID NO: 1780 - protein, 18 aa, Homo sapiens
CRARRRQRSTKLNHVILA

SEQ ID NO: 1781 - protein, 20 aa, Homo sapiens [sequence omitted]

SEQ ID NO: 1782 - protein, 18 aa, Homo sapiens
RDGAELGEAGGSTPNTVT

SEQ ID NO: 1783 - protein, 16 aa, Homo sapiens
LAGRDKSQRLWEPLRV

SEQ ID NO: 1784 - protein, 19 aa, Homo sapiens
RTTRKWNGCTHCYLAFNSD

SEQ ID NO: 1785 - protein, 17 aa, Homo sapiens
RAKLLREGWVHANRPKR

SEQ ID NO: 1786 - protein, 16 aa, Homo sapiens
RRVMLKEIYHPRMLLI

SEQ ID NO: 1787 - protein, 16 aa, Homo sapiens
SALARAFGEEEFLSSC

SEQ ID NO: 1788 - protein, 16 aa, Homo sapiens
RSCSRKMNSSGCLSEE

SEQ ID NO: 1789 - protein, 20 aa, Homo sapiens
PGPDRDATCNSRQAALAVSK

SEQ ID NO: 1790 - protein, 20 aa, Homo sapiens
SSHAAVSLRLQHRGRRRPGR

SEQ ID NO: 1791 - protein, 20 aa, Homo sapiens
DDSELGGAGSSRRRRTSSTA

SEQ ID NO: 1792 - protein, 20 aa, Homo sapiens
DGPPEPGAEQHLELEPGPRR

SEQ ID NO: 1793 - protein, 20 aa, Homo sapiens
CPILEQMSRLQSHSNTSIRY

SEQ ID NO: 1794 - protein, 20 aa, Homo sapiens
RYIDHAAVLLHGLASLLGLV

SEQ ID NO: 1795 - protein, 20 aa, Homo sapiens
CRMRQTVVTTWVLHLALSDL

SEQ ID NO: 1796 - protein, 18 aa, Homo sapiens
SASLPFFTYFLAVGHSWE

SEQ ID NO: 1797 - protein, 20 aa, Homo sapiens
CLVLWALAVLNTVPYFVFRD

SEQ ID NO: 1798 - protein, 17 aa, Homo sapiens
CYYNVLLLNPGPDRDAT

SEQ ID NO: 1799 - protein, 20 aa, Homo sapiens
CNSRQAALAVSKFLLAFLVP

SEQ ID NO: 1800 - protein, 20 aa, Homo sapiens
RGLPFVTSLAFFNSVANPVL

SEQ ID NO: 1801 - protein, 20 aa, Homo sapiens
CSRPEEPRGPARLLGWLLGS

SEQ ID NO: 1802 - protein, 16 aa, Homo sapiens
CAASPQTGPLNRALSS

SEQ ID NO: 1803 - protein, 20 aa, Homo sapiens
KEINDRRARFPSHEVDSSRE

SEQ ID NO: 1804 - protein, 18 aa, Homo sapiens
CVKDQEAQEPKPRKRANS

SEQ ID NO: 1805 - protein, 20 aa, Homo sapiens
RWTEWRILNMSSGIVNASER

SEQ ID NO: 1806 - protein, 19 aa, Homo sapiens
HSCPLGFGHYSVVDVCIFE

SEQ ID NO: 1807 - protein, 20 aa, Homo sapiens
GKVEKYMCFHNMSDDTWSAK

SEQ ID NO: 1808 - protein, 20 aa, Homo sapiens
RSIHILLGRRDHTQDWVQQK

SEQ ID NO: 1809 - protein, 15 aa, Homo sapiens
CRAKQSISFFLQLSM

SEQ ID NO: 1810 - protein, 20 aa, Homo sapiens
KEFRMNIRAHRPSRVQLVLQ

SEQ ID NO: 1811 - protein, 19 aa, Homo sapiens
AQRPPTDVGQAEATRKAAR

SEQ ID NO: 1812 - protein, 19 aa, Homo sapiens
KEFQEASALAVAPRAKAHK

SEQ ID NO: 1813 - protein, 16 aa, Homo sapiens
GGFCFRSTRHNFNSMR

SEQ ID NO: 1814 - protein, 18 aa, Homo sapiens
ETIRRALYITSKLSDANC

SEQ ID NO: 1815 - protein, 20 aa, Homo sapiens
FPPVLDGGGDDEDAPCALEQ

SEQ ID NO: 1816 - protein, 19 aa, Homo sapiens
RGARRLLVLEEFKTEKRLC

SEQ ID NO: 1817 - protein, 19 aa, Homo sapiens
NASEPGGSGGGEAAALGLK

SEQ ID NO: 1818 - protein, 18 aa, Mus musculus
GLRALACLPAVMLAARRA

SEQ ID NO: 1819 - protein, 16 aa, Homo sapiens
RPAGPGRGARRLLVLE

SEQ ID NO: 1820 - protein, 16 aa, Homo sapiens
CQRPPKPQEDGQPSPV

SEQ ID NO: 1821 - protein, 18 aa, Homo sapiens
CNMIGDVTTEQYFALRRK

SEQ ID NO: 1822 - protein, 16 aa, Homo sapiens
EGRADEQSAEAALAVP

SEQ ID NO: 1823 - protein, 19 aa, Homo sapiens
QNFVGRRRYGAESQNPTVK

SEQ ID NO: 1824 - protein, 19 aa, Homo sapiens
RIFRSIKQSMGLSAAQKAK

SEQ ID NO: 1825 - protein, 17 aa, Homo sapiens
CDRFVAVVYALESRGRR

SEQ ID NO: 1826 - protein, 18 aa, Homo sapiens
ATDHSRQEVSRIHKGWKE

SEQ ID NO: 1827 - protein, 18 aa, Homo sapiens
KTDVTRLTHSRDTEELQS

SEQ ID NO: 1828 - protein, 19 aa, Homo sapiens
ETQEQQSRSKRGTEDEEAK

SEQ ID NO: 1829 - protein, 18 aa, Homo sapiens
SPNPDKDGGTPDSGQELR

SEQ ID NO: 1830 - protein, 17 aa, Homo sapiens
CQLVTWRVRGPPGRKSE

SEQ ID NO: 1831 - protein, 15 aa, Homo sapiens
AANGSDNKLKTEVSS

SEQ ID NO: 1832 - protein, 17 aa, Homo sapiens
PRDSFRGSRSLSFRMRE

SEQ ID NO: 1833 - protein, 20 aa, Homo sapiens
ERFATMVRPVAESGATKTSR

SEQ ID NO: 1834 - protein, 16 aa, Homo sapiens
RLVQASGQKAPRPAAR

SEQ ID NO: 1835 - protein, 20 aa, Homo sapiens
RAVEAHSGASTTDSSLRPRD

SEQ ID NO: 1836 - protein, 18 aa, Homo sapiens
IFRLVQASGQKAPRPAAR

SEQ ID NO: 1837 - protein, 20 aa, Homo sapiens
DSSLRPRDSFRGSRSLSFRM

SEQ ID NO: 1838 - protein, 18 aa, Homo sapiens
RSLSFRMREPLSSISSVR

SEQ ID NO: 1839 - protein, 19 aa, Homo sapiens
GPEDGGLGALRGLSVAASC

SEQ ID NO: 1840 - protein, 16 aa, Homo sapiens
ANIGSLCVSFLQPKKE

SEQ ID NO: 1841 - protein, 17 aa, Homo sapiens
ETIFNAVMLWEDETVVE

SEQ ID NO: 1842 - protein, 19 aa, Homo sapiens
CNRKVYQAVRHNKATENKE

SEQ ID NO: 1843 - protein, 18 aa, Homo sapiens
CILEHAVNFEDHSNSGKR

SEQ ID NO: 1844 - protein, 18 aa, Homo sapiens
CNTSQRQRKRILSVSTKD

SEQ ID NO: 1845 - protein, 19 aa, Homo sapiens
CDAEKSNFTLCYDKYPLEK

SEQ ID NO: 1846 - protein, 16 aa, Homo sapiens
CTVDWKSKDANDSSFV

SEQ ID NO: 1847 - protein, 18 aa, Homo sapiens
CVEDLQTIQVIKILKYEK

SEQ ID NO: 1848 - protein, 19 aa, Homo sapiens
CQRPAKDLPAAGSEMQIRP

SEQ ID NO: 1849 - protein, 16 aa, Homo sapiens
TSDESLSVDDSDKTIG

SEQ ID NO: 1850 - protein, 18 aa, Homo sapiens
ERHVAIAKVKLYGSDKSC

SEQ ID NO: 1851 - protein, 15 aa, Homo sapiens
RSRDLRREVLRPLQC

SEQ ID NO: 1852 - protein, 16 aa, Homo sapiens
QEHYNYTKETLETQET

SEQ ID NO: 1853 - protein, 16 aa, Homo sapiens
GRRRVGTPGHHLLPLR

SEQ ID NO: 1854 - protein, 20 aa, Homo sapiens
MMRKKAKFSLRENPVEETKG

SEQ ID NO: 1855 - protein, 19 aa, Homo sapiens
MMIEYSNFEKEYDDVTIKM

SEQ ID NO: 1856 - protein, 20 aa, Homo sapiens
CEQTEEKKKLKRHLALFRSE

SEQ ID NO: 1857 - protein, 20 aa, Homo sapiens
KKRVGDGSVLRTIHGKEMSK

SEQ ID NO: 1858 - protein, 20 aa, Homo sapiens
DRARRERFIMNEKWDTNSSE

SEQ ID NO: 1859 - protein, 19 aa, Homo sapiens
RKNQEQWHVVSRKKQKIIK

SEQ ID NO: 1860 - protein, 18 aa, Homo sapiens
RKSAEKPQQELVMEELKE

SEQ ID NO: 1861 - protein, 18 aa, Homo sapiens
RQSAGDRRRLGLSRQTAK

SEQ ID NO: 1862 - protein, 18 aa, Homo sapiens
DRFLKIIRPLRNIFLKKP

SEQ ID NO: 1863 - protein, 16 aa, Homo sapiens
MILSNKEATPSSVKKC

SEQ ID NO: 1864 - protein, 16 aa, Homo sapiens
VYDSYRKSKSKDRKNN

SEQ ID NO: 1865 - protein, 16 aa, Homo sapiens
ARVPYTHSQTNNKTDC

SEQ ID NO: 1866 - protein, 20 aa, Homo sapiens
CMQGRKTTASSQENHSSQTD

SEQ ID NO: 1867 - protein, 16 aa, Homo sapiens
CANDSDTLELPDSSRA

SEQ ID NO: 1868 - protein, 17 aa, Homo sapiens
PLRARALRGRRLALGLC

SEQ ID NO: 1869 - protein, 16 aa, Homo sapiens
LQRQTFRLARSDRVLC

SEQ ID NO: 1870 - protein, 16 aa, Homo sapiens
RDKVRAGLFQRSPGDT

SEQ ID NO: 1871 - protein, 19 aa, Homo sapiens
CELKRDLQLLSQFLKHPQK

SEQ ID NO: 1872 - protein, 16 aa, Homo sapiens
TSVRFMGDMVSFEEDR

SEQ ID NO: 1873 - protein, 17 aa, Homo sapiens
RQEEEQSEIMEYSVLLP

SEQ ID NO: 1874 - protein, 17 aa, Homo sapiens
RTLFQRTKGRSGEAEKR

SEQ ID NO: 1875 - protein, 18 aa, Homo sapiens
GSLLEETTRKWAQYKQAC

SEQ ID NO: 1876 - protein, 16 aa, Homo sapiens
QTIENATDIWQDDSEC

SEQ ID NO: 1877 - protein, 16 aa, Homo sapiens
CPKKLSEGDGAEKLRK

SEQ ID NO: 1878 - protein, 16 aa, Homo sapiens
QQDHARWPRGSSLSEC

SEQ ID NO: 1879 - protein, 16 aa, Homo sapiens
EPTSTHESEHQSGAWC

SEQ ID NO: 1880 - protein, 16 aa, Homo sapiens
CEPREVRRVQWPATQQ

SEQ ID NO: 1881 - protein, 16 aa, Homo sapiens
RSGDFPPGDGGPEPPR

SEQ ID NO: 1882 - protein, 20 aa, Homo sapiens
CTAEDGATSRPLSSPPGRDS

SEQ ID NO: 1883 - protein, 18 aa, Homo sapiens
RESAGKNYNKMHKRERTC

SEQ ID NO: 1884 - protein, 19 aa, Homo sapiens
RDSPSYPDSSPEGPSEALP

SEQ ID NO: 1885 - protein, 19 aa, Homo sapiens
QVGPCRSLGSRGRGSSGAC

SEQ ID NO: 1886 - protein, 20 aa, Homo sapiens
CRDAGTELTGHLVPHHDGLR

SEQ ID NO: 1887 - protein, 20 aa, Homo sapiens
CKLAQAPGLRAGERSPEESL

SEQ ID NO: 1888 - protein, 19 aa, Homo sapiens
RVSDTPEGVNSLDPSHGES

SEQ ID NO: 1889 - protein, 18 aa, Homo sapiens
RSGKSQPSYIPFLLREES

SEQ ID NO: 1890 - protein, 16 aa, Homo sapiens
CEALDSKGIKWPQTQR

SEQ ID NO: 1891 - protein, 16 aa, Homo sapiens
DILDAQLQELKPSEKD

SEQ ID NO: 1892 - protein, 16 aa, Homo sapiens
RTHSLLYQPQKKVKSE

SEQ ID NO: 1893 - protein, 16 aa, Homo sapiens
RDSPYPESSPDMEEDL

SEQ ID NO: 1894 - protein, 19 aa, Homo sapiens
CQEQKMLRTLDLSYNNIRD

SEQ ID NO: 1895 - protein, 16 aa, Homo sapiens
CDSYANLNTEDNSLQD

SEQ ID NO: 1896 - protein, 17 aa, Homo sapiens
KGTADAANVTSTLENEE

SEQ ID NO: 1897 - protein, 19 aa, Homo sapiens
ERSLSAKDIMKNGKSNHLK

SEQ ID NO: 1898 - protein, 18 aa, Homo sapiens
CNLEKEDLSENSQSSMIK

SEQ ID NO: 1899 - protein, 16 aa, Homo sapiens
KRRVTKKSGSVSVSIS

SEQ ID NO: 1900 - protein, 16 aa, Homo sapiens
CGTQSAHSDYADEEDS

SEQ ID NO: 1901 - protein, 17 aa, Homo sapiens
DEEDSFVSDSSDQVQAC

SEQ ID NO: 1902 - protein, 19 aa, Homo sapiens
ATILKLLRTEEAHGREQRR

SEQ ID NO: 1903 - protein, 20 aa, Homo sapiens
CRRVPRDTLDTRRESLFSAR

SEQ ID NO: 1904 - protein, 17 aa, Homo sapiens
PLSSKRWRRRRYAVAAC

SEQ ID NO: 1905 - protein, 17 aa, Homo sapiens
CRRMGPRSPSVIFMINL

SEQ ID NO: 1906 - protein, 16 aa, Homo sapiens
MMIPIKDIKEKSNVGC

SEQ ID NO: 1907 - protein, 17 aa, Homo sapiens
CLVIRQLYRNKDNENYP

SEQ ID NO: 1908 - protein, 16 aa, Homo sapiens
CSTRISLFKAKEATLL

SEQ ID NO: 1909 - protein, 18 aa, Homo sapiens
ETFASPKETKAQKEKLRC

SEQ ID NO: 1910 - protein, 17 aa, Homo sapiens
ESRAVGLPLGLSAGRRC

SEQ ID NO: 1911 - protein, 18 aa, Homo sapiens
EDARGKRRSSLDGSESAK

SEQ ID NO: 1912 - protein, 17 aa, Homo sapiens
RTVWEQCVAIMSEEDGD

SEQ ID NO: 1913 - protein, 17 aa, Homo sapiens
CKVRFDANGATGPGSRD

SEQ ID NO: 1914 - protein, 16 aa, Homo sapiens
RRLSHDETNIFSTPRE

SEQ ID NO: 1915 - protein, 18 aa, Homo sapiens
GGPPEYLGQRHRLEDEED

SEQ ID NO: 1916 - protein, 16 aa, Homo sapiens
REEITTFIDETPLPSP

SEQ ID NO: 1917 - protein, 19 aa, Homo sapiens
RRPRPLGLSPRRLSLGSPE

SEQ ID NO: 1918 - protein, 17 aa, Homo sapiens
RYGALELCVPAWEDARR

SEQ ID NO: 1919 - protein, 17 aa, Homo sapiens
GAAAAEARRRATGRAGR

SEQ ID NO: 1920 - protein, 15 aa, Homo sapiens
ASRHFRARFRRLWPC

SEQ ID NO: 1921 - protein, 17 aa, Homo sapiens
RARRALRRVRPASSGPP

SEQ ID NO: 1922 - protein, 18 aa, Homo sapiens
ERYAAVLRPLDTVQRPKG

SEQ ID NO: 1923 - protein, 20 aa, Homo sapiens
RAYRRSQRASFKRARRPGAR

SEQ ID NO: 1924 - protein, 17 aa, Homo sapiens
RNYRDHLRGRVRGPGSG

SEQ ID NO: 1925 - protein, 20 aa, Homo sapiens
RARFQRCSGRSLSCSPQPTD

SEQ ID NO: 1926 - protein, 20 aa, Homo sapiens
ARGHFDPEDLNLTDEALRLK

SEQ ID NO: 1927 - protein, 20 aa, Homo sapiens
IGLRLRRERLLLMQEAKGRG

SEQ ID NO: 1928 - protein, 17 aa, Homo sapiens
RGSAAARSRYTCRLQQH

SEQ ID NO: 1929 - protein, 17 aa, Homo sapiens
ALCLGACCHRLRPRHSS

SEQ ID NO: 1930 - protein, 18 aa, Homo sapiens
CFFLLKPFRARDWKRRYD

SEQ ID NO: 1931 - protein, 16 aa, Homo sapiens
PFPILRSTDLNNNKSC

SEQ ID NO: 1932 - protein, 18 aa, Homo sapiens
QLSRHGSSVTRSRLMSKE

SEQ ID NO: 1933 - protein, 16 aa, Homo sapiens
LRQPPMAFQGISERQK

SEQ ID NO: 1934 - protein, 16 aa, Equine herpesvirus 2
YYDDLDDVDYEESAPC

SEQ ID NO: 1935 - protein, 20 aa, Equine herpesvirus 2
CDPYYPEMSTNVWRRAHVAK

SEQ ID NO: 1936 - protein, 16 aa, Equine herpesvirus 2
CYYVIIRRLLRRPSKK

SEQ ID NO: 1937 - protein, 18 aa, Equine herpesvirus 2
CKYIPFLSGDGEGKEGPT

SEQ ID NO: 1938 - protein, 18 aa, Homo sapiens
RNLTSSPAPTASPSPAPS

SEQ ID NO: 1939 - protein, 19 aa, Homo sapiens
PSWTPSPRPGPAHPFLQPP

SEQ ID NO: 1940 - protein, 18 aa, Homo sapiens
RSSHQKRGTTRDVGSNVC

SEQ ID NO: 1941 - protein, 19 aa, Homo sapiens
KSTSTTASFVSSSHMSVEE

SEQ ID NO: 1942 - protein, 20 aa, Homo sapiens
TSSPFLMAKPQKDEKNNTKC

SEQ ID NO: 1943 - protein, 16 aa, Homo sapiens
KKSMKKNLSSHKKAIG

SEQ ID NO: 1944 - protein, 16 aa, Homo sapiens
QRTIHLHFLHNETKPC

SEQ ID NO: 1945 - protein, 20 aa, Homo sapiens
RKHSLSSVTYVPRKKASLPE

SEQ ID NO: 1946 - protein, 18 aa, Homo sapiens
RAVSYRAQQGDTRRAVRK

SEQ ID NO: 1947 - protein, 18 aa, Homo sapiens
QRRTRLRLDGAREAAGPE

SEQ ID NO: 1948 - protein, 16 aa, Homo sapiens
QSFTQRFRLSRDRKVA

SEQ ID NO: 1949 - protein, 19 aa, Homo sapiens
RYGVGEAAVGAEAGEATLG

SEQ ID NO: 1950 - protein, 20 aa, Homo sapiens
SSRGTERPRSLKRGSKPSAS

SEQ ID NO: 1951 - protein, 17 aa, Homo sapiens
KPSASSASLEKRMKMVS

SEQ ID NO: 1952 - protein, 17 aa, Homo sapiens
RTTLFSFYFRDTPRANR

SEQ ID NO: 1953 - protein, 16 aa, Homo sapiens
RPEMSRGLLAVRGAFV

SEQ ID NO: 1954 - protein, 17 aa, Homo sapiens
CAVLSHRRAQPWALLLV

SEQ ID NO: 1955 - protein, 16 aa, Homo sapiens
RVLVSDSLFVICALSL

SEQ ID NO: 1956 - protein, 16 aa, Homo sapiens
KRKTNVLSPHTSGSIS

SEQ ID NO: 1957 - protein, 17 aa, Homo sapiens
CFSQENPERRPSRIPST

SEQ ID NO: 1958 - protein, 16 aa, Homo sapiens
SYKDEDMYGTMKKMIC

SEQ ID NO: 1959 - protein, 15 aa, Homo sapiens
VERHMSIMRMRVHSN

SEQ ID NO: 1960 - protein, 17 aa, Homo sapiens
CQRMDTVTMKALALLAD

SEQ ID NO: 1961 - protein, 20 aa, Homo sapiens
CSLRLPPEPERPRFAAFTAT

SEQ ID NO: 1962 - protein, 19 aa, Homo sapiens
RGPLPPGICAHSAQGALRR

SEQ ID NO: 1963 - protein, 20 aa, Homo sapiens
CRQAQARDLGAPWAVGLRSL

SEQ ID NO: 1964 - protein, 17 aa, Homo sapiens
QQKLEDPFQKHLNSTEE

SEQ ID NO: 1965 - protein, 19 aa, Homo sapiens
KKDKSLEADEGNANIQRPC

SEQ ID NO: 1966 - protein, 19 aa, Homo sapiens
SQHDPQLPPAQRNIFLTEC

SEQ ID NO: 1967 - protein, 18 aa, Homo sapiens
ILHPFRAKLQSTRRRALR

SEQ ID NO: 1968 - protein, 18 aa, Homo sapiens
CKKRGTKTQNLRNQIRSK

SEQ ID NO: 1969 - protein, 17 aa, Homo sapiens
EKPSSPSSGKGKTEKAE

SEQ ID NO: 1970 - protein, 20 aa, Homo sapiens
PSVQDNDPIPWEHEDQETGE

SEQ ID NO: 1971 - protein, 19 aa, Homo sapiens
KKPPTVSESQETPAGNSEG

SEQ ID NO: 1972 - protein, 16 aa, Homo sapiens
LVMSEEFREGLKGVWK

SEQ ID NO: 1973 - protein, 18 aa, Homo sapiens
GLPDKVPSPESPASIPEK

SEQ ID NO: 1974 - protein, 17 aa, Homo sapiens
PDVEQFWHERDTVPSVQ

SEQ ID NO: 1975 - protein, 19 aa, Homo sapiens
RHHEGVEMCLVDVPAVAEE

SEQ ID NO: 1976 - protein, 16 aa, Homo sapiens
RVPQTPGPSTASGVPE

SEQ ID NO: 1977 - protein, 19 aa, Homo sapiens
ETPRQRSESLSSRSTMVTS

SEQ ID NO: 1978 - protein, 17 aa, Homo sapiens
SSGAPQTTPHRTFGGGK

SEQ ID NO: 1979 - protein, 19 aa, Homo sapiens
KPAPEEELRLPSREGSIEE

SEQ ID NO: 1980 - protein, 17 aa, Homo sapiens
CPSESWVSRPLPSPKQE

SEQ ID NO: 1981 - protein, 18 aa, Homo sapiens
TGKLRGARYQPGAGLRAD

SEQ ID NO: 1982 - protein, 18 aa, Homo sapiens
ALERSLTMARRGPAPVSS

SEQ ID NO: 1983 - protein, 18 aa, Homo sapiens
DGSFSGSERSSPQRDGLD

SEQ ID NO: 1984 - protein, 19 aa, Homo sapiens
CGRDPSGSQQSASAAEASG

SEQ ID NO: 1985 - protein, 18 aa, Homo sapiens
ASRKAEAIGKLKVQGEVS

SEQ ID NO: 1986 - protein, 16 aa, Homo sapiens
SCLSYRVGTKPSASLR

SEQ ID NO: 1987 - protein, 18 aa, Homo sapiens
RVDYYLLHETWRFGAAAC

SEQ ID NO: 1988 - protein, 19 aa, Homo sapiens
HQSRALLGLTRGRQGPVSD

SEQ ID NO: 1989 - protein, 17 aa, Homo sapiens
CIHTRPWTSNTVFLVSL

SEQ ID NO: 1990 - protein, 17 aa, Homo sapiens
RGRQGPVSDESSYQPSR

SEQ ID NO: 1991 - protein, 20 aa, Homo sapiens
IDRYLIIKYPFREHLLQKKE

SEQ ID NO: 1992 - protein, 17 aa, Homo sapiens
TDNGTTCNDFASSGDPN

SEQ ID NO: 1993 - protein, 16 aa, Homo sapiens
FLKQRNRQVATALPLE

SEQ ID NO: 1994 - protein, 17 aa, Homo sapiens
RNVRIASRLGSWKQYQC

SEQ ID NO: 1995 - protein, 18 aa, Homo sapiens
GDHFRDMLMNQLRHNFKS

SEQ ID NO: 1996 - protein, 18 aa, Homo sapiens
CVAFPLAVGNPDLQIPSR

SEQ ID NO: 1997 - protein, 18 aa, Homo sapiens
NTLRHNALRIHSYPEGIC

SEQ ID NO: 1998 - protein, 19 aa, Homo sapiens
QASKLGLMSLQRPFQMSID

SEQ ID NO: 1999 - protein, 20 aa, Homo sapiens
DMMPKSFKFLPQLPGHTKRR

SEQ ID NO: 2000 - protein, 18 aa, Homo sapiens
QNLKDPVQIKIKHTRTQE

SEQ ID NO: 2001 - protein, 18 aa, Homo sapiens
KNKSFGGWNTSGCVAHRD

SEQ ID NO: 2002 - protein, 19 aa, Homo sapiens
RNNNEVYGKESYGKEKGDE

SEQ ID NO: 2003 - protein, 18 aa, Homo sapiens
CGRNGKRSNRTLREEVLR

SEQ ID NO: 2004 - protein, 19 aa, Homo sapiens
TSKSKSSSTTYFKRNSHTD

SEQ ID NO: 2005 - protein, 16 aa, Homo sapiens
DKSLSKLAHADGDQTS

SEQ ID NO: 2006 - protein, 18 aa, Homo sapiens
LFPLLRTSDDTPGNRTKC

SEQ ID NO: 2007 - protein, 18 aa, Homo sapiens
QDKYPMAQDLGEKQKALK

SEQ ID NO: 2008 - protein, 16 aa, Homo sapiens
SFPLDFLVKSNEIKSC

SEQ ID NO: 2009 - protein, 18 aa, Homo sapiens
RRRLSRQDLHDSIQLHAK

SEQ ID NO: 2010 - protein, 19 aa, Homo sapiens
KGEAKLDSRAKDVTLTIQE

SEQ ID NO: 2011 - protein, 20 aa, Homo sapiens
DHKEQPIVTENAERQLVVKD

SEQ ID NO: 2012 - protein, 20 aa, Homo sapiens
EDFEEQTLTLIFLDGERERK

SEQ ID NO: 2013 - protein, 19 aa, Homo sapiens
EGKEGDYIRIPERLLDVQD

SEQ ID NO: 2014 - protein, 20 aa, Homo sapiens
SEAYADGIEGYDILVACSSS

SEQ ID NO: 2015 - protein, 19 aa, Homo sapiens
NNLRENQNNQVKKDKKAAK

SEQ ID NO: 2016 - protein, 17 aa, Homo sapiens
DPFLNFSTPVVLFDALT

SEQ ID NO: 2017 - protein, 18 aa, Homo sapiens
GKIFSSCFHNTILCMQKE

SEQ ID NO: 2018 - protein, 17 aa, Homo sapiens
CPKFVNKILSSHQPLFS

SEQ ID NO: 2019 - protein, 20 aa, Homo sapiens
KQHARVISHVPENTKGAVKK

SEQ ID NO: 2020 - protein, 19 aa, Homo sapiens
ENTKGAVKKHLSKKKDRKA

SEQ ID NO: 2021 - protein, 16 aa, Homo sapiens
CKFHTSFDMMLRLTSI

SEQ ID NO: 2022 - protein, 19 aa, Homo sapiens
ENHDQDLDELQLEMEDSKP

SEQ ID NO: 2023 - protein, 18 aa, Homo sapiens
NPHFRDDLRRLRPRAGDS

SEQ ID NO: 2024 - protein, 20 aa, Homo sapiens
EDLHLDDEESSKRPLGLLAR

SEQ ID NO: 2025 - protein, 18 aa, Homo sapiens
DSGPLAYAAAGELEKSSC

SEQ ID NO: 2026 - protein, 19 aa, Homo sapiens
CAARRQHALLYNVKRHSLE

SEQ ID NO: 2027 - protein, 18 aa, Homo sapiens
DGSLKAKEGSTGTSESSV

SEQ ID NO: 2028 - protein, 18 aa, Homo sapiens
CSIDLGEDGMEFGEDDIN

SEQ ID NO: 2029 - protein, 17 aa, Homo sapiens
SEDDVEAVNIPESLPPS

SEQ ID NO: 2030 - protein, 18 aa, Homo sapiens
MHKTIKKEIQDMLKKFFC

SEQ ID NO: 2031 - protein, 17 aa, Homo sapiens
KEDSHPDLPGTEGGTEG

SEQ ID NO: 2032 - protein, 19 aa, Homo sapiens
RQVKRAAQALDQYKLRQAS

SEQ ID NO: 2033 - protein, 20 aa, Homo sapiens
RTDEAMPGRFQELDSRLASG

SEQ ID NO: 2034 - protein, 20 aa, Homo sapiens
DSSEVGDQINSKRAKQMAEK

SEQ ID NO: 2035 - protein, 20 aa, Homo sapiens
KAQPIKGARRAPDSSSEFGK

SEQ ID NO: 2036 - protein, 16 aa, Homo sapiens
RRKSNFRLRGYSTGKT

SEQ ID NO: 2037 - protein, 17 aa, Homo sapiens
RRQKSSYNYLLALAAAD

SEQ ID NO: 2038 - protein, 16 aa, Homo sapiens
CFLTSIPYYWWPNIWT

SEQ ID NO: 2039 - protein, 16 aa, Homo sapiens
CSIFFILNSIIVYKLR

SEQ ID NO: 2040 - protein, 15 aa, Homo sapiens
GRLIYSLLSFISIPH

SEQ ID NO: 2041 - protein, 12 aa, Homo sapiens
FFLFLWIHVDRE

SEQ ID NO: 2042 - protein, 14 aa, Homo sapiens
MDPTISTLDTELTP

SEQ ID NO: 2043 - protein, 20 aa, Homo sapiens
ASSIMLLDSGSEQNGSVTSC

SEQ ID NO: 2044 - protein, 19 aa, Homo sapiens
RVLLKVEVPESGLRVSHRK

SEQ ID NO: 2045 - protein, 20 aa, Homo sapiens
KDRLKSALRKGHPQKAKTKC

SEQ ID NO: 2046 - protein, 15 aa, Homo sapiens
MEPNGTFSNNNSRNC

SEQ ID NO: 2047 - protein, 19 aa, Homo sapiens
CTIENFKREFFPIVYLIIF

SEQ ID NO: 2048 - protein, 17 aa, Homo sapiens
GVLGNGLSIYVFLQPYK

SEQ ID NO: 2049 - protein, 17 aa, Homo sapiens
ADYYLRGSNWIFGDLAC

SEQ ID NO: 2050 - protein, 16 aa, Homo sapiens
FRLLHVTSIRSAWILC

SEQ ID NO: 2051 - protein, 20 aa, Homo sapiens
CGIIWILIMASSIMLLDSGS

SEQ ID NO: 2052 - protein, 20 aa, Homo sapiens
CLELNLYKIAKLQTMNYIAL

SEQ ID NO: 2053 - protein, 20 aa, Homo sapiens
VSHRKALTTIIITLIIFFLC

SEQ ID NO: 2054 - protein, 20 aa, Homo sapiens
CFLPYHTLRTVHLTTWKVGL

SEQ ID NO: 2055 - protein, 16 aa, Homo sapiens
CKDRLHKALVITLALA

SEQ ID NO: 2056 - protein, 18 aa, Homo sapiens
YFAGENFKDRLKSALRKG

SEQ ID NO: 2057 - protein, 20 aa, Homo sapiens
HPQKAKTKCVFPVSVWLRKE

SEQ ID NO: 2058 - protein, 20 aa, Homo sapiens
DSVSYEYGDYSDLSDRPVDC

SEQ ID NO: 2059 - protein, 19 aa, Homo sapiens
RESQGQDESVDSKKSTSHD

SEQ ID NO: 2060 - protein, 19 aa, Homo sapiens
PSAIYRRLHQEHFPARLQC

SEQ ID NO: 2061 - protein, 20 aa, Homo sapiens
CHWALRESQGQDESVDSKKS

SEQ ID NO: 2062 - protein, 23 aa, Homo sapiens
MGNDSVSYEYGDYSDLSDRPVDC

SEQ ID NO: 2063 - protein, 20 aa, Homo sapiens
TERLKIRWHTSDNQVRPQAC

SEQ ID NO: 2064 - protein, 19 aa, Homo sapiens
EADLGATGHRPRTELDDED

SEQ ID NO: 2065 - protein, 20 aa, Homo sapiens
RTCHRQQQPAACRGFARVAR

SEQ ID NO: 2066 - protein, 20 aa, Homo sapiens
EERPGSFTPTEPQTQLDSEG

SEQ ID NO: 2067 - protein, 19 aa, Homo sapiens
RSDPTAQPQLNPTAQPQSD

SEQ ID NO: 2068 - protein, 17 aa, Homo sapiens
RNVTDTDILALERRLLQ

SEQ ID NO: 2069 - protein, 17 aa, Homo sapiens
KKKRMAMARRTMFQKGE

SEQ ID NO: 2070 - protein, 19 aa, Homo sapiens
KSVTTSASGSENLTLIQQE

SEQ ID NO: 2071 - protein, 18 aa, Homo sapiens
EVDALEELSRQLFLETAD

SEQ ID NO: 2072 - protein, 16 aa, Homo sapiens
DRVGKTDPVTRGIEIT

SEQ ID NO: 2073 - protein, 18 aa, Homo sapiens
VRLPFIKEKEKKSPVGLH

SEQ ID NO: 2074 - protein, 20 aa, Homo sapiens
DEHNAALRTAGFPNGSLGKR

SEQ ID NO: 2075 - protein, 20 aa, Homo sapiens
GKRPSGSLGKRPSAPFRSNV

SEQ ID NO: 2076 - protein, 18 aa, Homo sapiens
SQPRMRETAFEEDVQLPR

SEQ ID NO: 2077 - protein, 19 aa, Homo sapiens
GDPAIYQSLKAQNAYSRHC

SEQ ID NO: 2078 - protein, 20 aa, Homo sapiens
PFSSHSSYTVRSKKIFLSKL

SEQ ID NO: 2079 - protein, 20 aa, Homo sapiens
GKILLNILTLGMRRKNTCQN

SEQ ID NO: 2080 - protein, 18 aa, Homo sapiens
EEVTTLVQAIRITSYMNE

SEQ ID NO: 2081 - protein, 17 aa, Homo sapiens
CKGNGESLWQRQRLQSE

SEQ ID NO: 2082 - protein, 16 aa, Homo sapiens
RHSRPYPSYRSTHRST

SEQ ID NO: 2083 - protein, 17 aa, Homo sapiens
TSHTSNLSWISIRRRQE

SEQ ID NO: 2084 - protein, 17 aa, Homo sapiens
DLEAKAPPRPQGHEAET

SEQ ID NO: 2085 - protein, 20 aa, Homo sapiens
KLQRRPVAVDVLLLNLTASD

SEQ ID NO: 2086 - protein, 16 aa, Homo sapiens
KTRPRLGQAGLVSVAC

SEQ ID NO: 2087 - protein, 16 aa, Homo sapiens
EFSGDISHSQGTNGTC

SEQ ID NO: 2088 - protein, 18 aa, Homo sapiens
SRLVWILGRGGSHRRQRR

SEQ ID NO: 2089 - protein, 17 aa, Homo sapiens
GQWQQESSMELKEQKGG

SEQ ID NO: 2090 - protein, 20 aa, Homo sapiens
EEQRADRPAERKTSEHSQGC

SEQ ID NO: 2091 - protein, 20 aa, Homo sapiens
MDTGPDQSYFSGNHWFVFSV

SEQ ID NO: 2092 - protein, 16 aa, Homo sapiens
VAIYAYYKKQRTKTDV

SEQ ID NO: 2093 - protein, 19 aa, Homo sapiens
VAVTKVPSQSGVGKPCWII

SEQ ID NO: 2094 - protein, 17 aa, Homo sapiens
CNMSKRMDIAIQVTESI

SEQ ID NO: 2095 - protein, 17 aa, Homo sapiens
RQSVEEFPFDSEGPTEP

SEQ ID NO: 2096 - protein, 19 aa, Homo sapiens
GHPPGSGGAESADTEARVR

SEQ ID NO: 2097 - protein, 20 aa, Homo sapiens
HSVASALKSHRTRGHGRGDC

SEQ ID NO: 2098 - protein, 18 aa, Homo sapiens
KGGAAVAGGRPTGASARR

SEQ ID NO: 2099 - protein, 17 aa, Homo sapiens
CLVRREFRKALKSLLWR

SEQ ID NO: 2100 - protein, 17 aa, Homo sapiens
RPFTATTKPEHEDQGLQ

SEQ ID NO: 2101 - protein, 20 aa, Homo sapiens
AFPPVLDVGTYSFIREEDQC

SEQ ID NO: 2102 - protein, 18 aa, Homo sapiens
HDRRKMKPVQFVAAVSQN

SEQ ID NO: 2103 - protein, 18 aa, Homo sapiens
RRRLLVLDEFKMEKRISR

SEQ ID NO: 2104 - protein, 20 aa, Homo sapiens
LRRCFSTTLLYCRKSRLPRE

SEQ ID NO: 2105 - protein, 19 aa, Homo sapiens
PLTLAGVVARRQPAGDRLC

SEQ ID NO: 2106 - protein, 17 aa, Homo sapiens
CSRRPDERLRFAVFTGA

SEQ ID NO: 2107 - protein, 18 aa, Homo sapiens
CKEILNRLLHRRSIHSSG

SEQ ID NO: 2108 - protein, 18 aa, Homo sapiens
CLEEQKRRRQRATKKIST

SEQ ID NO: 2109 - protein, 19 aa, Homo sapiens
EPEEVSGALSPPSASAYVK

SEQ ID NO: 2110 - protein, 19 aa, Homo sapiens
NGHAASRRLLGMDEVKGEK

SEQ ID NO: 2111 - protein, 20 aa, Homo sapiens
KKCLRTHAPCWGTGGAPAPR

SEQ ID NO: 2112 - protein, 19 aa, Homo sapiens
VLMAATHAVYGKLLLFEYR

SEQ ID NO: 2113 - protein, 19 aa, Homo sapiens
RRAPGPPSDTFVFNLALAD

SEQ ID NO: 2114 - protein, 18 aa, Homo sapiens
QRRQRRRQDSRVVARSVR

SEQ ID NO: 2115 - protein, 18 aa, Homo sapiens
RREPRQALAGTFRDLRSR

SEQ ID NO: 2116 - protein, 18 aa, Homo sapiens
KQVGRRWVASNPRESRPS

SEQ ID NO: 2117 - protein, 19 aa, Homo sapiens
KDCIESTGDYFLLCDAEGP

SEQ ID NO: 2118 - protein, 18 aa, Homo sapiens
VENQELSRGTFLGDSGSR

SEQ ID NO: 2119 - protein, 19 aa, Homo sapiens
GDSGSREVLLQEKQEKNHA

SEQ ID NO: 2120 - protein, 19 aa, Homo sapiens
SMLLRGNPQFQRQPQWDDP

SEQ ID NO: 2121 - protein, 20 aa, Homo sapiens
KVPSEELTTSSSHGPPPTAR

SEQ ID NO: 2122 - protein, 18 aa, Homo sapiens
RGSGEGGPQGNSSAGWAV

SEQ ID NO: 2123 - protein, 19 aa, Homo sapiens
QDTKKRSLLGTQVFFLLGT

SEQ ID NO: 2124 - protein, 19 aa, Homo sapiens
KEQKGQSMFVENKAFSMDE

SEQ ID NO: 2125 - protein, 18 aa, Homo sapiens
TATEIRNQVKKEMILAKR

SEQ ID NO: 2126 - protein, 19 aa, Homo sapiens
NYRQRKSMDSKGQKTYAPS

SEQ ID NO: 2127 - protein, 19 aa, Homo sapiens
SCSNLTVLVMRKNKINHLN

SEQ ID NO: 2128 - protein, 20 aa, Homo sapiens
DELDLGSNKIENLPPLIFKD

SEQ ID NO: 2129 - protein, 17 aa, Homo sapiens
QLSSPSRPTQKTLCSLR

SEQ ID NO: 2130 - protein, 20 aa, Homo sapiens
DMLKIASMHSQQIRKMEHAG

SEQ ID NO: 2131 - protein, 20 aa, Homo sapiens
AGGYRSPRTPSDFKALRTVS

SEQ ID NO: 2132 - protein, 17 aa, Homo sapiens
RESSCHIVTISSSEFDG

SEQ ID NO: 2133 - protein, 18 aa, Homo sapiens
GVKKVLTSFLLFLSARNC

SEQ ID NO: 2134 - protein, 19 aa, Homo sapiens
NSLLNPLIYAYWQKEVRLQ

SEQ ID NO: 2135 - protein, 19 aa, Homo sapiens
RRAALRPPRPARGSRLRSD

SEQ ID NO: 2136 - protein, 20 aa, Homo sapiens
RPVRLALGRLSRRALPGPVR

SEQ ID NO: 2137 - protein, 18 aa, Homo sapiens
DSRLSILPPLRPRLPGGK

SEQ ID NO: 2138 - protein, 19 aa, Homo sapiens
RPPEGPAVGPSEAPEQTPE

SEQ ID NO: 2139 - protein, 14 aa, Homo sapiens
VVARRAALRPPRPA

SEQ ID NO: 2140 - protein, 15 aa, Homo sapiens
PSEAPEQTPELAGGR

SEQ ID NO: 2141 - protein, 14 aa, Homo sapiens
GPSEAPEQTPELAG

SEQ ID NO: 2142 - protein, 20 aa, Homo sapiens
PDTNSTINLSLSTRVTLAFF

SEQ ID NO: 2143 - protein, 16 aa, Homo sapiens
VVDKNLRHRSSYFFLN

SEQ ID NO: 2144 - protein, 17 aa, Homo sapiens
LYIPHTLFEWDFGKEIC

SEQ ID NO: 2145 - protein, 16 aa, Homo sapiens
TQHTGVLKIVTLMVAV

SEQ ID NO: 2146 - protein, 19 aa, Homo sapiens
VNGPMILVSESWKDEGSEC

SEQ ID NO: 2147 - protein, 18 aa, Homo sapiens
CEPGFFSEWYILAITSFL

SEQ ID NO: 2148 - protein, 20 aa, Homo sapiens
AYFNMNIYWSLWKRDHLSRC

SEQ ID NO: 2149 - protein, 16 aa, Homo sapiens
CGHSFRGRLSSRRSLS

SEQ ID NO: 2150 - protein, 20 aa, Homo sapiens
IASKMGSFSQSDSVALHQRE

SEQ ID NO: 2151 - protein, 20 aa, Homo sapiens
IVLSFYSSATGPKSVWYRIA

SEQ ID NO: 2152 - protein, 16 aa, Homo sapiens
IIRVTTVPGKTGTVAC

SEQ ID NO: 2153 - protein, 16 aa, Homo sapiens
SPWTNDPKERINVAVA

SEQ ID NO: 2154 - protein, 18 aa, Homo sapiens
RIRELLQGMYKEIGIAVD

SEQ ID NO: 2155 - protein, 16 aa, Homo sapiens
TQTSDTATNSTLPSAE

SEQ ID NO: 2156 - protein, 18 aa, Homo sapiens
TEVPDSAQTSNTHTTSAS

SEQ ID NO: 2157 - protein, 17 aa, Homo sapiens
GDTAVERLNVFITMAKV

SEQ ID NO: 2158 - protein, 16 aa, Homo sapiens
MSLAKRVMTGLWIFTI

SEQ ID NO: 2159 - protein, 16 aa, Homo sapiens
LHFIIGFTVPMSIITV

SEQ ID NO: 2160 - protein, 20 aa, Homo sapiens
DELLEAPGDLETLPRLQQHC

SEQ ID NO: 2161 - protein, 20 aa, Homo sapiens
CVASHLLDGLEDVLRGLSKN

SEQ ID NO: 2162 - protein, 17 aa, Homo sapiens
KSGDPGPSVVGLVSIPG

SEQ ID NO: 2163 - protein, 19 aa, Homo sapiens
SKGIRKLKTESEMHTLSSS

SEQ ID NO: 2164 - protein, 20 aa, Homo sapiens
ELSLEVQKQVDRSVTLRQNQ

SEQ ID NO: 2165 - protein, 20 aa, Homo sapiens
EPEKQMLLHETHQGLLQDGS

SEQ ID NO: 2166 - protein, 20 aa, Homo sapiens
KRMQKRSVTALMVLNLALAD

SEQ ID NO: 2167 - protein, 16 aa, Homo sapiens
RPFVSQKLRTKAMARR

SEQ ID NO: 2168 - protein, 16 aa, Homo sapiens
ASYSDIGRRLQARRFR

SEQ ID NO: 2169 - protein, 16 aa, Homo sapiens
LEGTGSEASSTRRGGS

SEQ ID NO: 2170 - protein, 20 aa, Homo sapiens
RKALKMMLFGKIFQKDSSRC

SEQ ID NO: 2171 - protein, 19 aa, Homo sapiens
QIGLEMKNGISQSKERKAV

SEQ ID NO: 2172 - protein, 19 aa, Homo sapiens
RIYLIAKEQARLISDANQK

SEQ ID NO: 2173 - protein, 17 aa, Homo sapiens
ELNFKGAEEIYYKHVHC

SEQ ID NO: 2174 - protein, 16 aa, Homo sapiens
CVKNNWSNDVRASLYS

SEQ ID NO: 2175 - protein, 20 aa, Homo sapiens
SAEPPADWDGAGGSYRLLRG

SEQ ID NO: 2176 - protein, 17 aa, Homo sapiens
GIVRRVRVSVKRVSVLN

SEQ ID NO: 2177 - protein, 19 aa, Homo sapiens
RNEEFRRSVRSVLPGVGDA

SEQ ID NO: 2178 - protein, 20 aa, Homo sapiens
CEEEESWAGRRIPVSLLYSG

SEQ ID NO: 2179 - protein, 17 aa, Homo sapiens
CYLGIVRRVRVSVKRVS

SEQ ID NO: 2180 - protein, 18 aa, Homo sapiens
KELYRSYVRTRGVGKVPR

SEQ ID NO: 2181 - protein, 16 aa, Homo sapiens
ILTNRQPRDKNVKKCS

SEQ ID NO: 2182 - protein, 20 aa, Homo sapiens
CPNSATSLSQDNRKKEQDGG

SEQ ID NO: 2183 - protein, 17 aa, Homo sapiens
TTRPFKTSNPKNLLGAK

SEQ ID NO: 2184 - protein, 12 aa, Homo sapiens
ANEEGIEELVVA

SEQ ID NO: 2185 - protein, 13 aa, Homo sapiens
RKIESTASQAQSS

SEQ ID NO: 2186 - protein, 13 aa, Homo sapiens
LVDAVIDAYMNFI

SEQ ID NO: 2187 - protein, 16 aa, Homo sapiens
RTDSSTTNLFSEEVET

SEQ ID NO: 2188 - protein, 18 aa, Homo sapiens
NASDFPDYAAAFGNCTDE

SEQ ID NO: 2189 - protein, 17 aa, Homo sapiens
TFLITSTNRTNRSACLD

SEQ ID NO: 2190 - protein, 18 aa, Homo sapiens
TLTHGLQTDSCLKQKARR

SEQ ID NO: 2191 - protein, 16 aa, Homo sapiens
RLLSISCSIENQIHEA

SEQ ID NO: 2192 - protein, 17 aa, Homo sapiens
QQAVCSTVRCKVSGNLE

SEQ ID NO: 2193 - protein, 13 aa, Homo sapiens
QDIAEVDHSEGCF

SEQ ID NO: 2194 - protein, 14 aa, Homo sapiens
RKQWRLQQPILKLA

SEQ ID NO: 2195 - protein, 17 aa, Homo sapiens
CSISINFPSFFTTVMTC

SEQ ID NO: 2196 - protein, 14 aa, Homo sapiens
QWFLILWIWKDSDV

SEQ ID NO: 2197 - protein, 18 aa, Homo sapiens
AFLSDNTIEVRINRTLKK

SEQ ID NO: 2198 - protein, 17 aa, Homo sapiens
QETKNEFRNLKQIQSKC

SEQ ID NO: 2199 - protein, 14 aa, Homo sapiens
CNNKTHWAPVRSTM

SEQ ID NO: 2200 - protein, 17 aa, Homo sapiens
TKMAEYDLQNDVFIIPD

SEQ ID NO: 2201 - protein, 20 aa, Homo sapiens
CQDTTSSKTTEGRKELQKIV

SEQ ID NO: 2202 - protein, 18 aa, Homo sapiens
RDVESKVLETALKDPEQK

SEQ ID NO: 2203 - protein, 18 aa, Homo sapiens
KIQNDSVAIETQAITDNC

SEQ ID NO: 2204 - protein, 20 aa, Homo sapiens
CSEERKTFNLNVQMNSMDIR

SEQ ID NO: 2205 - protein, 19 aa, Homo sapiens
EEMDKKDQVYLNSQVVSAA

SEQ ID NO: 2206 - protein, 18 aa, Homo sapiens
SKSVTLTFQHVKMTPSTK

SEQ ID NO: 2207 - protein, 19 aa, Homo sapiens
CLLLPTAVIVFSYVKIIAK

SEQ ID NO: 2208 - protein, 17 aa, Homo sapiens
RPDSIPIQLSVVPTLLA

SEQ ID NO: 2209 - protein, 16 aa, Homo sapiens
CQTGGLKATKKKSLEG

SEQ ID NO: 2210 - protein, 16 aa, Homo sapiens
RLHTVTTVRKSSAVLE

SEQ ID NO: 2211 - protein, 16 aa, Homo sapiens
PTAVIVFSYVKIIAKV

SEQ ID NO: 2212 - protein, 20 aa, Homo sapiens
KLAQRLREVTGHTDHYFSQD

SEQ ID NO: 2213 - protein, 19 aa, Homo sapiens
CALQTWGSERRLGLDTSKD

SEQ ID NO: 2214 - protein, 19 aa, Homo sapiens
RGRRQSARNSRGPPEQPNE

SEQ ID NO: 2215 - protein, 15 aa, Homo sapiens
RNSRGPPEQPNEELG

SEQ ID NO: 2216 - protein, 15 aa, Homo sapiens
AQVREDVRPHTVVLR

SEQ ID NO: 2217 - protein, 13 aa, Homo sapiens
QLDQVPSRHPSRE

SEQ ID NO: 2218 - protein, 17 aa, Homo sapiens
LDSLSRSSNSREQLDQV

SEQ ID NO: 2219 - protein, 20 aa, Homo sapiens
REEHHFMVDARNRSYPLYSC

SEQ ID NO: 2220 - protein, 18 aa, Homo sapiens
PGPAPGGEEAADPRASRR

SEQ ID NO: 2221 - protein, 20 aa, Homo sapiens
CPRPSGSHKEAYSERPGGLL

SEQ ID NO: 2222 - protein, 19 aa, Homo sapiens
PSSGAPRPGRLPLRNGRVA

SEQ ID NO: 2223 - protein, 17 aa, Homo sapiens
FLGKNDDIKTKKELIVN

SEQ ID NO: 2224 - protein, 18 aa, Homo sapiens
QVTYRDSKEKRDLRNFLK

SEQ ID NO: 2225 - protein, 19 aa, Homo sapiens
CERTKIWGTFKINERFTND

SEQ ID NO: 2226 - protein, 17 aa, Homo sapiens
SKYANGIEIQLKKAYER

SEQ ID NO: 2227 - protein, 16 aa, Homo sapiens
CIVVFIVRTERSLHAP

SEQ ID NO: 2228 - protein, 18 aa, Homo sapiens
KILALFWFDSREISFEAC

SEQ ID NO: 2229 - protein, 16 aa, Homo sapiens
CVHQDVMKLAYADTLP

SEQ ID NO: 2230 - protein, 16 aa, Homo sapiens
RFGNSLHPIVRVVMGD

SEQ ID NO: 2231 - protein, 17 aa, Homo sapiens
KTKQIRTRVLAMFKISC

SEQ ID NO: 2232 - protein, 19 aa, Homo sapiens
KTDENEQDQSASVDMVFSP

SEQ ID NO: 2233 - protein, 18 aa, Homo sapiens
KKDYQYPKSLDILSNVGC

SEQ ID NO: 2234 - protein, 18 aa, Homo sapiens
KNLQTSDGDINNIDFDNN

SEQ ID NO: 2235 - protein, 19 aa, Homo sapiens
SQNGNNPQWELDYRQEKIC

SEQ ID NO: 2236 - protein, 20 aa, Homo sapiens
RPRLRVKMYNFLRSLPTLHE

SEQ ID NO: 2237 - protein, 16 aa, Homo sapiens
CNPSVPKQRVMKLTKM

SEQ ID NO: 2238 - protein, 17 aa, Homo sapiens
RLTRWRTRYKTIRINLG

SEQ ID NO: 2239 - protein, 18 aa, Homo sapiens
KDGVESCAFDLTSPDDVL

SEQ ID NO: 2240 - protein, 18 aa, Homo sapiens
LSGNFQKRLPQIQRRATE

SEQ ID NO: 2241 - protein, 16 aa, Homo sapiens
TIIRSRKKTVPDIYIC

SEQ ID NO: 2242 - protein, 19 aa, Homo sapiens
RRATEKEINNMGNTLKSHF

SEQ ID NO: 2243 - protein, 19 aa, Homo sapiens
CRIEGDTISQVMPPLLIVA

SEQ ID NO: 2244 - protein, 18 aa, Homo sapiens
RRHWAFGDIPCRVGLFTL

SEQ ID NO: 2245 - protein, 16 aa, Homo sapiens
CESFIMESANGWHDIM

SEQ ID NO: 2246 - protein, 20 aa, Homo sapiens
CSFKIVWSLRRRQQLARQAR

SEQ ID NO: 2247 - protein, 17 aa, Homo sapiens
RRRQQLARQARMKKATR

SEQ ID NO: 2248 - protein, 16 aa, Homo sapiens
TVPSSACDPSVHGALH

SEQ ID NO: 2249 - protein, 19 aa, Homo sapiens
CSLKPKQPGHSKTQRPEEM

SEQ ID NO: 2250 - protein, 17 aa, Homo sapiens
CISVANSFQSQSDGQWD

SEQ ID NO: 2251 - protein, 20 aa, Homo sapiens
RTRKQHSEATNSSNRVFVYC

SEQ ID NO: 2252 - protein, 19 aa, Homo sapiens
RVISQISADNYKIHGDPSA

SEQ ID NO: 2253 - protein, 16 aa, Homo sapiens
TSSSARTSNAKPFHSD

SEQ ID NO: 2254 - protein, 16 aa, Homo sapiens
NGTRPGMASTKLSPWD

SEQ ID NO: 2255 - protein, 16 aa, Homo sapiens
LGIAWDRRLRSPPAGC

SEQ ID NO: 2256 - protein, 16 aa, Homo sapiens
GERYMAVLRPLQPPGS

SEQ ID NO: 2257 - protein, 18 aa, Homo sapiens
CRDEPSALARALTWRQAR

SEQ ID NO: 2258 - protein, 16 aa, Homo sapiens
AAQRCLQGLWGRASRD

SEQ ID NO: 2259 - protein, 19 aa, Homo sapiens
RDSPGPSIAYHPSSQSSVD

SEQ ID NO: 2260 - protein, 14 aa, Homo sapiens
ALFSRIHLDWKVLF

SEQ ID NO: 2261 - protein, 18 aa, Homo sapiens
CIAFKDIMPFSAQVGDER

SEQ ID NO: 2262 - protein, 18 aa, Homo sapiens
KAFEEAYARADKKAPRPC

SEQ ID NO: 2263 - protein, 18 aa, Homo sapiens
ETKIQWHGKDNQVPKSVC

SEQ ID NO: 2264 - protein, 16 aa, Homo sapiens
CSYLGKDLPENYNEAK

SEQ ID NO: 2265 - protein, 16 aa, Homo sapiens
SDYDMPLDEDEDVTNS

SEQ ID NO: 2266 - protein, 16 aa, Homo sapiens
NPHGAHATSFPFNFSY

SEQ ID NO: 2267 - protein, 19 aa, Homo sapiens
ERALPRTYMASVYNTRHVC

SEQ ID NO: 2268 - protein, 16 aa, Homo sapiens
CAKMQNAEAADATLVF

SEQ ID NO: 2269 - protein, 20 aa, Homo sapiens
DRDTGRLEPSAHRLLVATVC

SEQ ID NO: 2270 - protein, 20 aa, Homo sapiens
RYMNQSFPSKLQRLMKKLPC

SEQ ID NO: 2271 - protein, 20 aa, Homo sapiens
CARAAGDAPLRSLEQANRTR

SEQ ID NO: 2272 - protein, 18 aa, Homo sapiens
VISYSKILQTTKASRKRL

SEQ ID NO: 2273 - protein, 18 aa, Homo sapiens
TVSLAYSRSHQIRVSQQD

SEQ ID NO: 2274 - protein, 20 aa, Homo sapiens
CTWFPEKGAILTDTSVKRND

SEQ ID NO: 2275 - protein, 20 aa, Homo sapiens
TYGRDNGQLLGERVARRDIC

SEQ ID NO: 2276 - protein, 20 aa, Homo sapiens
QETLPTLQPNQNMTSEERQR

SEQ ID NO: 2277 - protein, 19 aa, Homo sapiens
RTSQSYTCNQECDNCLNAT

SEQ ID NO: 2278 - protein, 20 aa, Homo sapiens
RPQSHPRTDPDDPKITIVSC

SEQ ID NO: 2279 - protein, 16 aa, Homo sapiens
VARRQAKKIENTGSKT

SEQ ID NO: 2280 - protein, 14 aa, Homo sapiens
KVIVTGQVLKNSSA

SEQ ID NO: 2281 - protein, 14 aa, Homo sapiens
MSSNSSLLVAVQLC

SEQ ID NO: 2282 - protein, 16 aa, Homo sapiens
IAKQQAIKIETTSSKV

SEQ ID NO: 2283 - protein, 13 aa, Homo sapiens
MTSNFSQPVVQLC

SEQ ID NO: 2284 - protein, 12 aa, Homo sapiens
KLILSGDVLKAS

SEQ ID NO: 2285 - protein, 17 aa, Homo sapiens
SGDVLKASSSTISLFLE

SEQ ID NO: 2286 - protein, 18 aa, Homo sapiens
QDKPEVDKGEGQLPEESL

SEQ ID NO: 2287 - protein, 14 aa, Homo sapiens
LINISHLIRKILVS

SEQ ID NO: 2288 - protein, 12 aa, Homo sapiens
MDPTVPVFGTKL

SEQ ID NO: 2289 - protein, 15 aa, Homo sapiens
RYATLMQKDSSQETT

SEQ ID NO: 2290 - protein, 16 aa, Homo sapiens
KIFYGHLLKKFRQPNF

SEQ ID NO: 2291 - protein, 14 aa, Homo sapiens
YSVIEATEGEESLC

SEQ ID NO: 2292 - protein, 16 aa, Homo sapiens
CTSIMEKDLTYSSVKR

What is claimed is:

1. An isolated antigenic peptide according to any one of SEQ ID NOS. 692-2292.

2. An isolated antigenic peptide comprising an amino acid sequence that is at least about 90% identical to a sequence set forth in any one of SEQ ID NOS. 692-2292.

3. An isolated antigenic peptide that is an analog of an antigenic peptide according to any one of SEQ ID NOS. 692-2292.

4. An isolated antigenic peptide comprising a short antigenic amino acid sequence that is identical to at least 5 consecutive amino acids set forth in any one of SEQ ID NOS. 692-2292.

5. An isolated antigenic peptide comprising a short antigenic amino acid sequence that is identical to or contains no more than one conservative amino acid substitution over at least 7 consecutive amino acids set forth in any one of SEQ ID NOS. 692-2292.

6. A kit for the detection of antibodies against a particular GPCR in a sample comprising:
a) an isolated antigenic peptide according to any one of claims 1-5 and derived from the particular GPCR, and
b) at least one of a reagent or a device for detecting the antibodies.

7. An isolated antibody having high specificity and high affinity or avidity for a particular GPCR comprising a peptide sequence that is identical to any one of SEQ ID NOS. 692-703, 713-730, 744-802, 807-820, 825-875, 880-889, 917-941, 950-964, 971-984, 989-993, 1010-1013, 1021-1024, 1029-1043, 1049-1052, 1057-1072, 1087-1113, 1124-1151, 1161-1172, 1179-1187, 1198-1209, 1228-1231, 1245-1257, 1271-1279, 1304-1308, 1369-1372, wherein the antibody was produced using an isolated antigenic peptide comprising the peptide sequence that is identical to the any one of SEQ ID NOS. 692-703, 713-730, 744-802, 807-820, 825-875, 880-889, 917-941, 950-964, 971-984, 989-993, 1010-1013, 1021-1024, 1029-1043, 1049-1052, 1057-1072, 1087-1113, 1124-1151, 1161-1172, 1179-1187, 1198-1209, 1228-1231, 1245-1257, 1271-1279, 1304-1308, 1369-1372.

8. An isolated antibody having high specificity and high affinity or avidity for a particular GPCR comprising a peptide sequence that is at least about 90% identical to any one of SEQ ID NOS. 692-703, 713-730, 744-802, 807-820, 825-875, 880-889, 917-941, 950-964, 971-984, 989-993, 1010-1013, 1021-1024, 1029-1043, 1049-1052, 1057-1072, 1087-1113, 1124-1151, 1161-1172, 1179-1187, 1198-1209, 1228-1231, 1245-1257, 1271-1279, 1304-1308, 1369-1372, wherein the antibody was produced using the peptide sequence that is at least about 90% identical to the any one of SEQ ID NOS. 692-703, 713-730, 744-802, 807-820, 825-875, 880-889, 917-941, 950-964, 971-984, 989-993, 1010-1013, 1021-1024, 1029-1043, 1049-1052, 1057-1072, 1087-1113, 1124-1151, 1161-1172, 1179-1187, 1198-1209, 1228-1231, 1245-1257, 1271-1279, 1304-1308, 1369-1372.

9. An isolated antibody having high specificity and high affinity or avidity for a particular GPCR comprising a peptide sequence that is an analog to any one of SEQ ID NOS. 692-703, 713-730, 744-802, 807-820, 825-875, 880-889, 917-941, 950-964, 971-984, 989-993, 1010-1013, 1021-1024, 1029-1043, 1049-1052, 1057-1072, 1087-1113, 1124-1151, 1161-1172, 1179-1187, 1198-1209, 1228-1231, 1245-1257, 1271-1279, 1304-1308, 1369-1372, wherein the antibody was produced using an isolated antigenic peptide comprising the peptide sequence that is the analog to the any one of SEQ ID NOS. 692-703, 713-730, 744-802, 807-820, 825-875, 880-889, 917-941, 950-964, 971-984, 989-993, 1010-1013, 1021-1024, 1029-1043, 1049-1052, 1057-1072, 1087-1113, 1124-1151, 1161-1172, 1179-1187, 1198-1209, 1228-1231, 1245-1257, 1271-1279, 1304-1308, 1369-1372.

10. An isolated antibody having high specificity and high affinity or avidity for a particular GPCR comprising a peptide sequence that is identical to at least 5 consecutive amino acids set forth any one of SEQ ID NOS. 692-703, 713-730, 744-802, 807-820, 825-875, 880-889, 917-941, 950-964, 971-984, 989-993, 1010-1013, 1021-1024, 1029-1043, 1049-1052, 1057-1072, 1087-1113, 1124-1151, 1161-1172, 1179-1187, 1198-1209, 1228-1231, 1245-1257, 1271-1279, 1304-1308, 1369-1372, wherein the antibody was produced using a short isolated antigenic peptide comprising the at least 5 consecutive amino acids set forth in the any one of SEQ ID NOS. 692-703, 713-730, 744-802, 807-820, 825-875, 880-889, 917-941, 950-964, 971-984, 989-993, 1010-1013, 1021-1024, 1029-1043, 1049-1052, 1057-1072, 1087-1113, 1124-1151, 1161-1172, 1179-1187, 1198-1209, 1228-1231, 1245-1257, 1271-1279, 1304-1308, 1369-1372.

11. An isolated antibody specific for a particular GPCR comprising a peptide sequence that is identical to any one of SEQ ID NOS. 704-712, 731-743, 774-777, 803-806, 821-824, 876-879, 890-916, 942-949, 965-970, 985-988, 994-1009, 1014-1020, 1025-1028, 1044-1048, 1053-1056, 1073-1086, 1114-1123, 1152-1160, 1173-1178, 1188-1197, 1210-1227, 1232-1244, 1258-1270, 1280-1303, 1309-1368, 1373-1377, 1386-1389, 1394-1402, 1462-1482, 1496-1525, 1542-1549, 1557-1563, 1583-1649, 1656-1679, 1684-1688, 1693-1732, 1744-1752, 1765-1839, 1846-1854, 1855-1866, 1871-1917, 1926-1941, 1952-1955, 1960-1980, 1985-2141, 2152-2165, and 2170-2292, wherein the antibody was produced using an isolated antigenic peptide comprising the peptide sequence that is identical to the any one of SEQ ID NOS. 704-712, 731-743, 774-777, 803-806, 821-824, 876-879, 890-916, 942-949, 965-970, 985-988, 994-1009, 1014-1020, 1025-1028, 1044-1048, 1053-1056, 1073-1086, 1114-1123, 1152-1160, 1173-1178, 1188-1197, 1210-1227, 1232-1244, 1258-1270, 1280-1303, 1309-1368, 1373-1377, 1386-1389, 1394-1402, 1462-1482, 1496-1525, 1542-1549, 1557-1563, 1583-1649, 1656-1679, 1684-1688, 1693-1732, 1744-1752, 1765-1839, 1846-1854, 1855-1866, 1871-1917, 1926-1941, 1952-1955, 1960-1980, 1985-2141, 2152-2165, and 2170-2292.

12. An isolated antibody specific for a particular GPCR comprising a peptide sequence that is at least about 90% identical to any one of SEQ ID NOS. 704-712, 731-743, 774-777, 803-806, 821-824, 876-879, 890-916, 942-949, 965-970, 985-988, 994-1009, 1014-1020, 1025-1028, 1044-1048, 1053-1056, 1073-1086, 1114-1123, 1152-1160, 1173-1178, 1188-1197, 1210-1227, 1232-1244, 1258-1270, 1280-1303, 1309-1368, 1373-1377, 1386-1389, 1394-1402, 1462-1482, 1496-1525, 1542-1549, 1557-1563, 1583-1649, 1656-1679, 1684-1688, 1693-1732, 1744-1752, 1765-1839, 1846-1854, 1855-1866, 1871-1917, 1926-1941, 1952-1955, 1960-1980, 1985-2141, 2152-2165, and 2170-2292, wherein the antibody was produced using the peptide sequence that is at least about 90% identical to the any one of SEQ ID NOS. 704-712, 731-743, 774-777, 803-806, 821-824, 876-879, 890-916, 942-949, 965-970, 985-988, 994-1009, 1014-1020, 1025-1028, 1044-1048, 1053-1056, 1073-1086, 1114-1123, 1152-1160, 1173-1178, 1188-1197, 1210-1227, 1232-1244, 1258-1270, 1280-1303, 1309-1368, 1373-1377, 1386-1389, 1394-1402, 1462-1482, 1496-1525, 1542-1549, 1557-1563, 1583-1649, 1656-1679, 1684-1688, 1693-1732, 1744-1752, 1765-1839, 1846-1854, 1855-1866, 1871-1917, 1926-1941, 1952-1955, 1960-1980, 1985-2141, 2152-2165, and 2170-2292.

13. An isolated antibody specific for a particular GPCR comprising a peptide sequence that is an analog to any one of SEQ ID NOS. 704-712, 731-743, 774-777, 803-806, 821-824, 876-879, 890-916, 942-949, 965-970, 985-988, 994-1009, 1014-1020, 1025-1028, 1044-1048, 1053-1056, 1073-1086, 1114-1123, 1152-1160, 1173-1178, 1188-1197, 1210-1227, 1232-1244, 1258-1270, 1280-1303, 1309-1368, 1373-1377, 1386-1389, 1394-1402, 1462-1482, 1496-1525, 1542-1549, 1557-1563, 1583-1649, 1656-1679, 1684-1688, 1693-1732, 1744-1752, 1765-1839, 1846-1854, 1855-1866, 1871-1917, 1926-1941, 1952-1955, 1960-1980, 1985-2141, 2152-2165, and 2170-2292, wherein the antibody was produced using an isolated antigenic peptide comprising the peptide sequence that is the analog to the any one of SEQ ID NOS. 704-712, 731-743, 774-777, 803-806, 821-824, 876-879, 890-916, 942-949, 965-970, 985-988, 994-1009, 1014-1020, 1025-1028, 1044-1048, 1053-1056, 1073-1086, 1114-1123, 1152-1160, 1173-1178, 1188-1197, 1210-1227, 1232-1244, 1258-1270, 1280-1303, 1309-1368, 1373-1377, 1386-1389, 1394-1402, 1462-1482, 1496-1525, 1542-1549, 1557-1563, 1583-1649, 1656-1679, 1684-1688, 1693-1732, 1744-1752, 1765-1839, 1846-1854, 1855-1866, 1871-1917, 1926-1941, 1952-1955, 1960-1980, 1985-2141, 2152-2165, and 2170-2292.

14. An isolated antibody specific for a particular GPCR comprising a peptide sequence that is identical to at least 5 consecutive amino acids set forth any one of SEQ ID NOS. 704-712, 731-743, 774-777, 803-806, 821-824, 876-879, 890-916, 942-949, 965-970, 985-988, 994-1009, 1014-1020, 1025-1028, 1044-1048, 1053-1056, 1073-1086, 1114-1123, 1152-1160, 1173-1178, 1188-1197, 1210-1227, 1232-1244, 1258-1270, 1280-1303, 1309-1368, 1373-1377, 1386-1389, 1394-1402, 1462-1482, 1496-1525, 1542-1549, 1557-1563, 1583-1649, 1656-1679, 1684-1688, 1693-1732, 1744-1752, 1765-1839, 1846-1854, 1855-1866, 1871-1917, 1926-1941, 1952-1955, 1960-1980, 1985-2141, 2152-2165, and 2170-2292, wherein the antibody was produced using a short isolated antigenic peptide comprising the at least 5 consecutive amino acids set forth in the any one of SEQ ID NOS. 704-712, 731-743, 774-777, 803-806, 821-824, 876-879, 890-916, 942-949, 965-970, 985-988, 994-1009, 1014-1020, 1025-1028, 1044-1048, 1053-1056, 1073-1086, 1114-1123, 1152-1160, 1173-1178, 1188-1197, 1210-1227, 1232-1244, 1258-1270, 1280-1303, 1309-1368, 1373-1377, 1386-1389, 1394-1402, 1462-1482, 1496-1525, 1542-1549, 1557-1563, 1583-1649, 1656-1679, 1684-1688, 1693-1732, 1744-1752, 1765-1839, 1846-1854, 1855-1866, 1871-1917, 1926-1941, 1952-1955, 1960-1980, 1985-2141, 2152-2165, and 2170-2292.

15. A kit for the detection of antibodies against the particular GPCR of claim 5 comprising:
a) an isolated antibody according to any one of claims 7-14, and
b) at least one of a reagent or a device for detecting the antibody.

16. An assay for the detection of a particular GPCR in a sample, comprising:
a) providing an isolated antigenic peptide according to any one of claims 1-5,
b) contacting the isolated antigenic peptide with the sample under conditions suitable and for a time sufficient for the antigenic peptide to bind to one or more antibodies specific for the particular GPCR present in the sample, to provide an antibody-bound antigenic peptide, and
c) detecting the antibody-bound antigenic peptide, and therefrom determining whether the sample contains the particular GPCR.

17. The assay of claim 16 further comprising the step of binding the isolated antigenic peptide or the antibody to a solid substrate.

18. The assay of claim 16 or 17 wherein the sample is an unpurified sample.

19. The assay of any one of claims 15-18 further comprising, prior to the contacting, obtaining the sample from a human being.

20. The assay of any one of claims 15-19 wherein the assay is selected from the group consisting of a countercurrent immuno-electrophoresis (CIEP) assay, a radioimmunoassay, a radioimmunoprecipitation, an enzyme-linked immuno-sorbent assay (ELISA), a dot blot assay, an inhibition or competition assay, a sandwich assay, an immunostick (dip-stick) assays, a simultaneous assay, an immunochromatographic assay, an immunofiltration assay, a latex bead agglutination assay, an immunofluorescent assay, a biosensor assay, and a low-light detection assay.

21. An isolated nucleic acid molecule encoding an antigenic peptide according to any one of SEQ ID NOS. 692-2292.

22. The isolated nucleic acid molecule according to claim 21 wherein the molecule encodes a naturally occurring human antigenic peptide.

23. An isolated nucleic acid molecule encoding an antigenic peptide that is at least about 90% identical to any one of the antigenic peptides set forth in SEQ ID NOS. 692-2292.

24. The isolated nucleic acid molecule according to claim 23 wherein the antigenic peptide is at least about 95% identical to the antigenic peptide.

25. The isolated nucleic acid molecule according to claim 23 or 24 wherein the molecule encodes a naturally occurring human antigenic peptide.

26. A process for producing an isolated polynucleotide comprising hybridizing a nucleotide encoding an antigenic peptide according to any one of SEQ ID NOS. 692-2292 to genomic DNA under highly stringent conditions and isolating the polynucleotide detected with the nucleotide.

27. A method of identifying an amino acid sequence for an antigenic peptide from a candidate polypeptide sequence wherein the antigenic peptide has a length of about 5 to about 100 amino acids, the method comprising:
a) searching the candidate polypeptide sequence using a comparison window of the length, and
b) selecting against amino acid sequences of the length and having at least 3 characteristics selected from the group consisting of 1) at least two consecutive prolines, 2) at least two consecutive serines, 3) at least two consecutive lysines, 4) at least two consecutive arginines, 5) at least two consecutive aspartic acids, 6) at least two consecutive glutamic acids, 7) methionine, 8) tryptophan, and 9) at least five consecutive amino acids comprising no charged amino acids.

28. The method of claim 27 wherein the method further comprises selecting against at least 5 of the characteristics.

29. The method of claim 27 wherein the method further comprises selecting against at least 7 of the characteristics.

30. The method of claim 27 wherein the method further comprises selecting against the 9 characteristics.

31. The method of any one of claims 27-30 wherein the method further comprises:
c) selecting against amino acid sequences of the length and having at least one of the following additional characteristics 1) sequences having at least 5 consecutive amino acids that are identical to an alternative amino acid sequence from an alternative polypeptide that is different from the candidate polypeptide, 2) posttranslational modification sites, and 3) highly hydrophobic sequences.

32. The method of claim 31 wherein the posttranslational modification sites are phosphorylation or glycosylation sites.

33. The method of claim 31 or 32 wherein the method further comprises selecting against at least 2 of the additional characteristics.

34. The method of claim 31 or 32 wherein the method further comprises selecting against the 3 additional characteristics.

35. The method of any one of claims 27-34 wherein the method further comprises performing a BLAST-type or a FAST-type analyses for the candidate polypeptide sequence.

36. The method of any one of claims 27-34 wherein the method further comprises performing a BLAST analysis for the candidate polypeptide sequence.

37. The method of any one of claims 27-36 wherein the antigenic peptide has a length from 6 amino acids to about 50 amino acids.

38. The method of any one of claims 27-36 wherein the antigenic peptide has a length from 6 amino acids to about 20 amino acids.

39. The method of any one of claims 27-36 wherein the antigenic peptide has a length of about 20 amino acids.

40. The method of any one of claims 27-39 wherein the polypeptide is a protein.

41. The method of any one of claims 27-40 wherein the polypeptide is a human protein.

42. The method of any one of claims 27-41 wherein the polypeptide is a naturally occurring protein.

43. An isolated antigenic peptide that is specific for the candidate polypeptide of any one of claims 27-42 that is produced according to the method of any one of claims 27-42.

44. An antigenic peptide that is at least about 90% identical to the isolated antigenic peptide of claim 43.

45. An isolated antigenic peptide that is an analog of the isolated antigenic peptide of claim 43.

46. An isolated antigenic peptide comprising a short antigenic amino acid sequence that is identical to at least 5 consecutive amino acids of the isolated antigenic peptide of claim 43.

47. An isolated antigenic peptide comprising a short antigenic amino acid sequence that is identical to or contains no more than one conservative amino acid substitution over at least 7 consecutive amino acids of the isolated antigenic peptide of claim 43.

48. A kit for the detection of antibodies against the candidate polypeptide of any one of claims 43-47 in a sample comprising:
a) an isolated antigenic peptide according to any one of claims 43-47 and derived from the candidate polypeptide, and
b) at least one of a reagent or a device for detecting the antibodies.

49. An isolated antibody specific for a candidate polypeptide comprising an amino acid sequence that is identical to the amino acid sequence of the isolated antigenic peptide of claim 43, wherein the antibody was produced using the isolated antigenic peptide of claim 43.

50. An isolated antibody specific for a candidate polypeptide comprising an amino acid sequence that is identical to the amino acid sequence of the isolated antigenic peptide of claim 44, wherein the antibody was produced using the isolated antigenic peptide of claim 44.

51. An isolated antibody specific for a candidate polypeptide comprising an amino acid sequence that is identical to the amino acid sequence of the isolated antigenic peptide of claim 45, wherein the antibody was produced using the isolated antigenic peptide of claim 45.

52. An isolated antibody specific for a candidate polypeptide comprising an amino acid sequence that is identical to the amino acid sequence of the isolated antigenic peptide of claim 46, wherein the antibody was produced using the isolated antigenic peptide of claim 46.

53. An isolated antibody specific for a candidate polypeptide comprising an amino acid sequence that is identical to the amino acid sequence of the isolated antigenic peptide of claim 47, wherein the antibody was produced using the isolated antigenic peptide of claim 47.

54. The isolated antibody of any one of claims 49-53 wherein the antibody has high specificity and high affinity for the candidate polypeptide.

55. A kit for the detection of antibodies against the candidate polypeptide of any one of claims 43-47 comprising:
a) an isolated antibody according to any one of claims 49-53, and
b) at least one of a reagent or a device for detecting the antibody.

56. An assay for the detection of a candidate polypeptide in a sample, comprising:
a) providing an isolated antigenic peptide according to any one of claims 43-47,
b) contacting the isolated antigenic peptide with the sample under conditions suitable and for a time sufficient for the antigenic peptide to bind to one or more antibodies specific for the candidate polypeptide present in the sample, to provide an antibody-bound antigenic peptide, and
c) detecting the antibody-bound antigenic peptide, and therefrom determining whether the sample contains the candidate polypeptide.

57. The assay of claim 56 further comprising the step of binding the isolated antigenic peptide or the antibody to a solid substrate.

58. The assay of claim 56 or 57 wherein the sample is an unpurified sample.

59. The assay of any one of claims 56-58 further comprising, prior to the contacting, obtaining the sample from a human being.

60. The assay of any one of claims 56-59 wherein the assay is selected from the group consisting of a countercurrent immuno-electrophoresis (CIEP) assay, a radioimmunoassay, a radioimmunoprecipitation, an enzyme-linked immuno-sorbent assay (ELISA), a dot blot assay, an inhibition or competition assay, a sandwich assay, an immunostick (dip-stick) assays, a simultaneous assay, an immunochromatographic assay, an immunofiltration assay, a latex bead agglutination assay, an immunofluorescent assay, a biosensor assay, and a low-light detection assay.

61. An isolated nucleic acid molecule encoding an antigenic peptide according to any one of claims 43-47.

62. The isolated nucleic acid molecule according to claim 61 wherein the molecule encodes a naturally occurring human antigenic peptide.

63. An isolated nucleic acid molecule encoding an antigenic peptide that is at least about 90% identical to any one of the antigenic peptides set forth in claims 43-47.

64. The isolated nucleic acid molecule according to claim 63 wherein the antigenic peptide is at least about 95% identical to the antigenic peptide.

65. The isolated nucleic acid molecule according to claim 63 or 64 wherein the molecule encodes a naturally occurring human antigenic peptide.

66. A process for producing an isolated polynucleotide comprising hybridizing a nucleotide encoding an antigenic peptide according to any one of claims 43-47 to genomic DNA under highly stringent conditions and isolating the polynucleotide detected with the nucleotide.
